United States Patent Application Publication US 2022/0211063 A1 - sequence listing, part 57

SEQ ID NO: 161 - DNA, 233237 bp, Penicillium roqueforti
  misc_feature (10466)..(10484): n is a, c, g, or t
  misc_feature (32299)..(32318): n is a, c, g, or t
  misc_feature (34350)..(40670): n is a, c, g, or t
  misc_feature (41690)..(47881): n is a, c, g, or t
  misc_feature (53547)..(53810): n is a, c, g, or t
  misc_feature (86727)..(86745): n is a, c, g, or t
  misc_feature (112678)..(112882): n is a, c, g, or t
  misc_feature (199115)..(199323): n is a, c, g, or t
ggtcgtatgtggtggcggctcgtatgtgaattacgttatggatgggatagattcgtttgacttatggaggtttacacattaacggggtcgattttaataggacgtagctgtatgcaactaatagttactagttgaacctcagaatgcaagtagatcagcacaattcagttaacatttcccaagacatacatatttctcggccaaattgaatagagcgatagtcaccgggaaaagattccccaagtggggaaatttcggctattgcatgggtagctgtcagcaatcgagaaccctggaaggaacagttaattacatacacagattgcggactcccctccacatcgactgtttttgcatcccctctcaaaaccatggcgcataacaatctcagccccgaagagatcgaaagagcatcccagcttctaagtgcacaagaaaaagccgtcgcgctcttcgaggagatcgaacgcgatttggtccgaccaggaatcaccgaaaagaccctaaatgccgaaatctaccaactaggactcgatcgctatggtatcaagacccattggcacaaacgagtcatccgcagcggaccaaacaccctaagcccgttcaacgataaccctccggatcgtgtcatccagccggatgatatcctagttgttgacctggggccggtcttcgaagcctgggaagccgactttgggcgcaccttcgtcctaggagatgatccaaacaagaagaagctgcgggacgccctggagcccatctggaacacagtcaaggcaaaatatcgcgagaacccagatatgtccggcgacgagctatacaatatctcttgccaggttgcgaaacaagacggctgggatttcggcgcggatattgcgggccatctcgttgggtcgttcccgcatgaacgcattccgcgggacagaatctccctgtatatcgccaagggcaataatgagtcaatgggtctgtcgggccgtgattggttcaagcgtcattggattctggaaattcatcttcatgataaggcacgcgggtatggtggtttctacgagcaactcttgacggttgattaggctttctgggatgtttctatgcaagtcatactacttattgcgatggacgcaattcatggattcctcgctgttgctttccgttgagtgtactatgtatgtctttaatgcggcggacataattcatcaagaccttcttctaacgcgtgaaagaaccgagcgccttgtttaagtatccagacagtgcattcgggatggttctatgtgcagttttaggatatgccagattgataggcctttaatttagccctcagcctcgtaagagttcgacttgtgcttgggctcgaacttgaaagtgtcgggtgcaggacccaggaacatttcactgtagtatcaatgaatgattagttaatgagtcaaaaacgttaatgaaagaaaacttacgtgatcttgatccagtctttgtagttgccactgcccattagcgtctccaactcattgcggccgcgccaagcaggaggtctgtcctgaatgttaggagggaggtgctccaacagtccaattgggacatagcgataggcaaagctgagccactctagcatgaagcggcgggttgttccaacaccatgctcatcagaaccccaggcctgaagaccgtacttggcgaacttttcaatataggccagacgctcagtcgcggacttatccaaatactggccggtttgaatttcctcaaatatccatggcttgatcaaagctccacgagccaccatcacagagtccacaccagcattgttgacgtggtcatcgtagtcggtatgcgagtagcagtcgccgtttccaacgaaataagtcttgccgccattgggcatgtggcgggcatccggttcacgaatggtgtcggttagtgcatcctgcttcttgttcaggcgcttgatgagggctgcacagtctgagatgtatccccagtctgcctgtcgagtgtagcgctgctgtctactacgtccgtgcagggtgatggctgcggcgcccggggggcccaggtccagaacactagactcatatccaccaagaaccatacgctcaaccagcttctgggcggtaggctggttatccttggttcccatgcgaatcttgacggtaatcggaatctccagcgagacagtgttcataccgcgaatcatcttctctaatttggagtgatgatcaagaagagctgagccagctccatcacggaagacaagttcaatggggcagccgcagttcaagtcaataacacgcaggttgggtgtaaacttcgacaacacctcagtagccttgagagcttgccatggcttgttagcggcaatttgtgcgccgaacttgaaatccttggagttatcatagccctgaacaacattgtcgcctgggatgacggttggcggtgtcatttccgactcgtgcgccttcaacagggtccattcggactttgagccttgaatcaaaggcatactcatagccatctctgagtatgtaaactgcgcgcccaggtctgtacagagtcttcggaatggcatgttgccttgggttgtgagaggtgccaaaacaggtgtctccggtccaaagtaaatgcgacgcttctctgacggcatgaagggaggctcaaggaactgagcacggttctcctgcaggtcgatcttcgcctgctcgtccggttcaacaagctcacccttctcgcggatggtcgatcgctggtggatcgccttctccaattctgcagacacctgaacggaccatgtggtgtaggcatcagcccggggggtgtcctcgcgctttctcgtaagtgccattttgtcttgattggaaatgatgttgacaattccctcaggtgtggcgtgggccacacgaggccgagctttctccatacgttctgcgtcctccagcaagatcaattctttcttgccgtcttcagtctcgcgttccgttgagtgtgagccaaccatgcgacatttccagccggaagagcatttccctagcgcttcgtagacgggacacatattgttcaaggttgtgagatcctcgcgtttatgttctttcagataaacacgcaaatcgtgctcaaatcggcatttctcgccatattggcactctccagcggcaaattcgttggcgaacattctcgtgctgcacaggcccttcgcatctttagatgtaccgtaggtgcgattggtgttctggcccttcttcttcttctttcccttgtccttcttgccaccatcacgatcatcatgggcagcgccctcggcggcatcgtcagggttagtttcatcggcagggcgaggcttaggtgtgatatgaatgcgatacctgattgatgaaagttagtacttcataatcattgaggggtagctggacgtactctgctttgataggtgcaattcctctgtcgcgcatatctacctgggcgggttttgaaggttcatccaatcgtgccttcttggctggaggctcttccacatccgctgcgccaggatcatttgcggcgtcgcgcttcggaatctcactgtcaggcgtagcaacattggccactggggcttgggcctgtatggtctctggctccattgtatttagagggaaaagcgaactgttcactaaacttcgcaatcgctatcggaggaacattcagtcaaaatttcgaatccaggctattgtttgcattgtttgcattcaatacaattggctcggtaggtttgtggatccttttctataacgggcaagcgcaaacttaaatcctacaaccccgctcattgccttcggcatccaggtatctccatgctcgacaattaatcaatcaatacatcgataccgggacaaataccatatgtacagtatgtgccgatgcggccggattcagccgccccctcgatcgagtttggcgtcccccccgtttgggtttggtccatcccaattcggtttggcgccccggactatcctcaaactggcatctgccatctccgaccgcctgccagcctcaccctttacactaggtatataacttccagtgcgtcgctcgatcatcctcctctctttgactgactgtactcttttctctcccgtcatgcccagccgcgaaatgataccgtaattttggatcgcacggcatccttccccctgcacctccctatttcagctgagtttctcgacatacctccaggggcttcaccagtccccttgtccgggatggcaacacaaagcccatggtttctgcgtttcccccctgaaatagtttcatccattgtgtcctttctgccaaataaagatgtcaagtccttgcgcttaacgtataaagccctcggcgagatttcaccattctcctcctcacgtgtgtttctttccgccaattcgttaaatatccaagtttttcgggctatagtagactatctaaagtttcgccacaaaatcagggagattatctaggataacgcacggtttatactcgcgccgttaatataggaaactatatacctaagcatcgaccccgaatacatagaaatcaactcgactaagggatatcctatctagtttatagaggaatacgaagagaaccgctataggatgaagtatcagaaatactgtaacgtagaccgacctaaccatattatacattagtaccagatagatacctaaatgccgttaaaagcctattagaagtattatcgctaactataggataatcagatatctataatcggatccaaagataataaaaaagcctttctttatagcctagagcgattcctatagcttaagagagtgaccgttacgcctacggctcacagctagctgtttactccgctatataagatacctataatccaagcatttctatatagattcaactatccgattccgcgaggatagtactatgatcccgttaattatcgggttatcgagccgctactatggttagaggcaaccgaggactataaggagctatagagaggggctcaaattgttcttcgccttttattataagctaagtataatatttccgagctaagcttcaactctaagcaactctataccagactaaacttttggattttcgaccggccctataaggaatacaatcaatttacggctatcataaaacgtctaggcttctggtatctttatctatctttactcactagtagtaactgggtaggattccaaagcggattattctatcaagctatgagcctggctaaggaattgacctatatccatttatcaactacattcaatgatagatctcattctttaataagtgttgaatttcgtacagcgtaatttaccactagaccataacaaaaaccaaggttcttgtttagggcctagaggggccatatcccattcttgacaataaggaatctacctattcccctaaaggaggttctgcctattaaggagtggccgaatctatctcacttagcgctctctcgtttcagcgttaatacatcggagttgatagatatactcaaattggcaccatcctcattacaatctcttgacttagaatttatcgagttcccctttgatgaattgtgtttaactggtctactagagaggatgcgagagggactagattggactgagagagatcaaccgtccaaaccgaccgttgcgatcgcgatgaaaggccatcgcatatagccgggggggttcatcaaactttcaaacgaggtagcaagctttatttatggctctggagaaaatcccttggatggaacagatacacgcagccccaaagacggatacgggacgaatcatgacctttttgaggcggagtacactcggcccaacgtcaatttccaggatcttaggaaactgggaatcatttgttaggaatgctacctagctgaccccgaacctgatgcattctgacgtgctcactgttgccctatgcagtttgtagacctttctgtgtggcattccttccctttctctttctcctctctggcagacagcttgccgcgtcggcgttttctttgtatgtctgcagagatgcttcttctgtgttctggtggatggattctggctggctttgtggtgtgaagctatatagacaagcttcagtacagtagctagtttcccatcttccatcaaacttcatctttctgcctctggctgatcactccattccctcgtagtcaggacctctcatcagagccgaaggtttgaatgtcttgcattgagttttaatcttggaaccttggaaggttattaatacccattcgtctattcaaaaaaaaacctatcaatatgtatcaagacatgtccaatctgttacatgctgcggtttctactcgtctatcaagaccgagctacttccctacatatatatactgagtacctggatagatctcttgcgatagttatggtatccatcagatattttcttgctagttaaccgactacaataggactgatagcatctgataaataatccagatggccttttatatctattctcattgtgcaatccaacaaaccaaacctcgtccacatcgaactttcacttccaccccaaaagcaacctttgctttgttactatatgtaccctcaaacatacaattattccacttcacttgggcgcgtaactcagtggtagagtgttcgctttgcatgcgaaaagtccggcgttcaatccgccgcccgtccatctatttttgtccgtttcattttttgctcgcaaagccggtgcgatcaggcgagcgccacctccattttgcctagagtatgattatgaccttgattattttacgtttttctaagctttaatttctatatatgtctcgttatatgacttgcttgaatttgggtgattggtggacttactccaaatataaattgtacatattcaacccctaaccttttaataaaatcaattttagaaatgaaagagaagatactttatagcgtctattggggacaatcttacaagagcaacgaagaagataattccgaggaagtaatgaagatgcgagaaatgacttactatagtttctgaactgtccttttattttggtctgtctcggtttttaatatctagagcatatctgctgcacttgttcctgagacggctattacctttgaccgacttttccatatataatatgtgtgagcagagtgttgtcattcaattgatgatattgtacctcactccataaagagcaaattggttgtgatatgtggtatcagactccaactaccagctccccatcaaatccaggtgcctgagaaaggtaataaccgcgctgattactgaccaccatcttcttggtaccctcctcaatgtaactgacattgaagtgagtatgcccaaatgcccataattttacgagcggactcttccagacctcgtgtccagagagatcgctggcaaagcccgacgacagcgagctatttacatgccttggatcaaccgcccggggatcctgagtgactgggctatgatgtgtaaaaaccacgatcttgcgatgcggctcagaactagcgatatgagaaacctgtccatttaaccaccccaagtctgcttcatgagcagctgtgtggtcgtcaaccgtccagtcctttatgttgtaaaagtcattgagaccatagctgacgtgctccttatgggcctcgctcactcgcgaaaagagtgtgcaccctaagacagtcacttctggtgagagatcgtagcgagtctgatccaagaagatgaaagaacccatagtttccgaatctccatcttgttctgttgaacgccgacgatcaacagacgccgagaattgatgaaggagttgcttcgtctcctcccaggttgaatcgtagggctcatggttccccaacagaaagaaaacgatttggaattggcgcaactgggtctcgatgaatgtaatgaagcctgcgtcattgacaactcctatgtcacccaggagggcaagatgcggcgccttcggggagatattgaacacatcgtaggcagacggattttctaaatgtaaatccgacaatatctgaaacgtggacatctggccgtacaccgaatgaggcaagttttgctgatgttatggatgaatgtctgggggggcgatagtcaccaaccaaccagatgcaatgccaaaagacccgccaagtgtggctaagttacatgtggcggtgcggatatacatagtgtggcgtaacacagcctccttccctcagttgtctaagcgcccagacatggatgatctcataggaacccctccttggctcttggccaagaaaatatatttatctccttccttcccctatttcaacgttcctgatttctttgttccgaggttgtccttagaggcgttcctgagcttctttctatcagcttatcaactattgtcacacgacgtcataaccgcgttatcaacaccttaatattgcgggcaatattgaaagacacaagatagcgaccaacacgatggcgagcgcagcacacgatcccagactgctatacagcgtcaataatatccgtgctttccacatccaagatggcgaagagcaggacctcacgccgtccggcgctcaaaccctatcattgctaatggtccccaccaacactgccactgctggccctgggacagattggcctgaagattcaccggaagaggatttctatcttcacctgtatatcccacctgagctcgatattgcgatcccagcgaccactcagatcttccaccaagctcccgacagttatctgattccccgctgggacatgggtcccgaagctggcgctttcattcgcatccagttccctagcattggaactggccctggcaacgtgtctcaggatgatattgatacctttgaatctatccttgcgcagtgcactgcattcctcgagcgcaccccgtacccgaaggctcaggactatactgcttacaaccccgctgactacgcacccggcgagggctacgttgggacacccgatacaaagcaaggagatgcacatggaagaattgtgcttgtggacgaagaaaacggcagtgtggtgggagagctaggagacggctacaatgtagtcgaggatgccgacgtgaagcctggctctaagagtaagtgttgaatcatggtcacctgtcaatcagcaactgactaatatcgaacaggaccggtaggaattgaacttcctgcagaaggcggaggtaatcaggtcagcgtcagcaatgtctccgaagaatacctgtcattggcccggcacccggcatataagaactcgacactcgttcagagttcggctacagcatctcgtctgatagtaactggatcaacatatctggcaagtgctattgcgagtggcgcggagaatttccaaaagaagacacagccgaaccccaagcctttgaaattctcagacgctacccacgcgcgcattcgtaaggtcggcaatttatccaacggagcagcagatatttctgctcgcacagtcggacaggtcggacgagttgcacagaacataggcgcgtcactggcacgcaagcaagaatctggccggaataaaggcttcgacaggcgcaatccaccaccagaatacaagcccggtgtgttgaacaaatcaatgatcgcatttacaaccctggccgacggcatcgagcagagtgcccgaaacatgctattctccggtgctggcgccgccagctccatgatcgaacaccgttacggaaatgaggcaggcgccgtggcaacccacctgacgggcggaatcaagaacgttggattggtttacattgacgccaccggtgtcagtcgccgcgcgctattgaagtctgttgccaaaggcatggtcgttggaaaaatgcgcgatggtcaacaggttgtcgtcggcggtggtgacggcggccaggtaccggctaacgccgtgcagtctgcttcgggcccttctaacttgagcgcccgggaccctgttgtgcggcgtgcgtcgcctacccccacaccgcctcctgcatatggtgcgtcgggaacaaggtccctcaagggggggtccacgtcagggggtaagcggtaaaatctgggggctggcgctagttacagtgcttggaggagcgagatctcgtataggagatgtttgggttttttaatttttgtgatttggtatgacggacatgatttctctttttgcaagctcttgattgaggattgaggctggcagcttcttgattttcctattctacactttttgatacctatgtacttgatttcctctcattcttggctttccccttccgttttagtgctcagaccttgccgctccgcagccatcactggattgatcttgttttcggcagcaaacaaaagggcgaggcagctgtcgagtctgtcaacgtcttccaccatctctcatacaaaggtgctaaagacttagatgctatttatgacccaatggaacggttagccaccatcggcattattcannnnnnnnnnnnnnnnnnngcaaactcctcaccaaatcttccaccgacctcacgcccaggcctatatttagctaccaattacctttctctttcagttgatcggatcctgtagatgcatggttataatcagcttttcttgtggattatcgcttcttttcacttactgaatgtggcggatccatcgcggggaatattttgtattatcgtttcctggccaaaccctcgtcacgtgtcatgttgagttgtgatccatgtcaccatcctttaagaaagttcctcctctttgtttgctaaagtgaaaaaaaaatccaaactcctcttcctcctcctctagccttcatagcgacgatggctggtttttacttcacggaacaaaaattggaacaatgatcttatctcgtctatttctagttttctagactcaataggtatcccaaaccttctttggggtcaactatctacttactgtttatggagttcctacgattgtggatgtcagtattttatctcgattgaccggattaatctactaatattccaataggaagcagcttttgttattccggatgatcttacccaggtcgcattctcttcacttgagagtgctgggtttttaccctgtaacagcttaggctgtccgcacttagatacaaaccgagtgccaccggaatttaagcacctgcatattaatgatgaggttgcggtctcgctctatcggaaatctgatgtactatgggagtttgacttggagaaaaatccagatattatgattgcgtcggacgatcgactcccgtcggcatctccaggtcgtggccgaggacgcttcttatcgtgtccttgtaccgtgaaaatccattctgctgtgagatattgtgaggccctgattctattactttgccgtgactacgactcttcttatgagacttattggctagctattctgagctatatgttggagtatgttgacggtacggatatcttggatgaaaacaagttgcaagaaggttatagaaagttttaccatgccctcaaaactaggagatcaagagatgtatttaatactggatgagcttcgatttgcgttgattgaagagcgtcccctcccagtgatagattattaacaagaccgggctaataccccaagacacaacaagagacacaaataagacaccaaaaaagacaccaaagaagatatagcgcgttgtcctttttaaccttgccctcatgtagttattcaggacgtttgctgttgccttacgtaatataacttcaattctattggctagaaatgggacgcgccccaatatagtagcggccccacaaggtgcctacctagagagtatacaacagtaaagtcggggctttccactttctgtttctttcctctcatcatcactctccatctgacatccttttatcatggaatcacgtattgaagatggtcagccagatcctctgcatatcttttcggagtttgaagaccccactcgtcatagcctcatccagcagatcgttcaggatgacccaggattggccatgatcccgcagcagaatctctatgccttatggttcagtgatattagtgctctgcaggagaaggctaatgcgcaaaccaaagtcgcgaaaaagctccgcgcaagagacctgaggttgctccccaaccagtacgatgttgttggtatttgtgagtggatctacaagttatatctacaatattaaactaactattcttcaggggcttgtgaggggcagaaaactgcagccagccgagaagaacctcaaggttctgcgcctcggctaggtcttagtgaacgcggtcgatccagctcgcccaacactggctcctttagcaagccatctacgccagagcacgagaacacggtggatgtgagtttatcagaaatcacaaagaggaaatagtgctaatatggccttctagctcccatccgagagtgctaatcgtgatggttatcattgcgtagtgacaaagcgcggactaccattgattgatagtgcccatatcataacgaagaagctcaacggtgctcggagtctgtatctcacgcaatatgagtgctgggactggcttagcgctttctggggcgatgagaaagtcgacaggttgcagagcctcttggtgtctgagggcataatggacacggagcgacttcataaccagatcactctggatatccaggtgcaggaatattgggatcgtgcgatgtgtgcacttcgccctgtttgggtcagtgaagaccaaacagaaatgcaaatcgcgtttcattggctgcctcttcaagagaacctcccagagttggaaaatacttatcggggtgagatggtctcggttatggagaacccataccaggatccaaagtaccgacctcatgagacccctgggaacaataacttcattttccatatggagacgggagttagaatcccctcgggatatgtcttcacggtcaagacggacaataagtatgaacggccactgccctccatggaacttttggaactgaggtggcatctgtctcgcattgcttgtatgcggggcagagacgaggacggagatggtgcttatgagtctgatggtggcttttccgtccgttcaggctctcgatcccctatctagaaagaagttatgctccactcgaacatatctttccgtccagccaccaagccaccgtcgccctcaaagctacagaatgtgtctttcgagggtgatttcagtcccttatcccggagtggtgggatcgtttcgcactcttgacggagtgactggtttcggtttgtcttgatactgatatgttagaataggatggacgtatgggttaggcctcatttcgcttaggtgaggataacaatgcatgttctgaatctgaccttcgaaaatatgtaaagttttcgtctgattcctatatgagtgacttccggtctttctgcgaccggggtcttccaggatacctttgggtgttctggaagatccaacagccatgagcttggacctctgctgctgagatgcgaccgtttggatgccagggtagacgaggcagatgtaaactgtgctgtctgtcttcgtacagatatccattaaaatgaatttccaaattagagagtaaattattattcgagaaatgactcccaacccaaaacggcaaaccaggtacgcggtttacttcataaacaactaacaaacccaagtcactcctataaccagaatttgtccaaaaagcatattcaattcttgtttccaacccgcttttgcattgttttgcattttcgggcttatggcgagggcgaggatagccattagacagggttgctcatatgcgttgccagctgccgctggacgatctatcggatattgattgggtgatggtatacaacgttgtagaggcaaaaactgccaacgcatcgattgacagttgtccacggcccaccgtggtggctttgtccaatgagggcgatcagcactcacatgagtatcaagtcacaaacgcttgacatttacatctggagtattggtgatccgggggctgtcagaaaggtagaaaagcagtggaggatttagtggattgagcatcaattactccgtactgcatgcagatatgtactccgtatattgatggagacagtgggtaagtggatagcgtaaggtttagtcttgcaggccggactatccaggcaccgcatcgagtggtgtgcactccattttccggaccgagatttcaggacgtcaaggttgcagttggatataaaactcgagcagatcgggatccgaccatggttcttgccatgcttaccgtggttaggtggttccagggttcgggctatggcccctcttcaatctgcgtattacccccatacggagtccttcgtagcttcaaagcgttaaagcccgaagcgagagtccactatggtgagcgctaattgtcaggatcaagctagggaggtgaactactgcacgctattcttatatctaatctctggatctttgagtctgggattgatcaagtcaacaacattgagtttattaaaaatataattaatctcgtagtaacattgatttaattcagatgcgtacctatgtaattaggctggaccaatgaagaaggagaaaaaaaccgagatctgggcttccgttctgagagaggctaataatgacgatcgtcccaagtgtccactctatgaggattcgaaacagccggtgcaaccccctatttattattatttgcatctttcgcttgaaaccgagcaatttagcgcccggtcatgctactattatttcgggcttatccacagaggacgtcgtaacgccatacacttctctcccttctttggcacatgcgaggatttctcgggactcgagccctttttggcaaaggttactggcgcaagggattcgagatcaatatatgggcaattaatctatccactcctcatacaggatttagtttgtctttgttgtcctgatgtatcataacagtccttggcctatgtaccgactcggtatatgtagtatagcttctctattccagatcgtagcaagatacaacacgatagtcccatccatagtataatatcaagtagctcgtagacttccatgtaaacatccccgtatcatatcagtcaaaccctcatccaaggctcaagagccaaagacccgcctcccccagactaacagaaactaccagtcgtatcttacctcctcttttttccttcttcaccttctcatccggcctctccctctaccctttgggcctttttttttttcttttggtctgtgttttcttgtttctttgattctgttctttgggggtctcttctgccccctttttcgactcggatcccccgaccggtgtttcccgtctttttcctcccctcgcgacccctgtccgcgcccctcagtaatcctattttcgacaatgttcatctgttgtcgcaattgaatcagagttctgttgatcaggtccgcaatcgcgtccgagacatttgttaccgcgtttgctcgattccttggacaacgtgcgaccgcaaaccccaagtcgtgggtctggaggggaactcttgaagtactgcagcgcaggtatctttagctttcctttcgtttttcgagaaacttgttgtttttcgacgcgtcttgacacctgaacaagctcgcgacctggtgtcctcggtgatattcaaccatcatctaacggtttttgcgcgattggtcgtaagctagtccccccccattcctccgatcggatctcctgctgtcagttgtccacccccccattcttgggtgaaaaggcacatttttggcgattatcgataagcatctggggaaatattcaagctgacccatggcccaatgtctacagatcgcgctttgcagagtcatttggcgagtgcgaccggtcgccccaacctcccgacttttgccaaacacccccgggcattgtgttccctcgcgccaattgtgccaatcgcaattgataccagaatcgtgtcaacgagtgcccgcagaagctgcctcggaccgtcacacagcaagtctcgtaaggctttgcgcatctactagacaaaggtatgctatcggccgtgatgcatattgcctcacagcgcgtacccgtccgccaaaccattcaattcgataaataggttgctaatctccaaaagccgtttctgaggccggtcccgaacagctttttccggctatgagcacttctcatcagcaggccttgccactccccgctcatgcccctgcagtatcgaccacatcatctccagcccagaagaatgcgcgcgcaccctatcccgacatgttaggttcaccgccggttcctcccccgaggacctcttccagtcgccgtactcagaatgaaacctctacagagaaaacgagtagctctcgacaaggcaagagcaggtccgatcgaaaagacacccgtgatcgcacgcgcgataccacgcgcgatgaccgaaatggtagatcacggaggcagcctgaggacacatctcgtgaagtacaatcaaggacggagtcagaagtggacatccctggccgtgtaaaagaaccaagcgcggaggccaagtctgtgctgcctagcgaccatgctatggacgagagagaacgacccgccacagaaaatgcctctacgggtagcgccgaagaggaggctcgtgggcctcgaagtcgtcatgattacaataatgggaacgttgtcaaacgcaaagaaaccaccttcggctcgtacattctcggacaaaccctcggcgagggagagtttggaaaggtcaagctgggatggaagcgcgatggcactctccaggtagcaatcaagctcatccgaagagacacactggggaccaaccccagccgattaccgaaaatctaccgtgaaatcgccattctgcgtgagctggcgcaccccaacattgtgcgcctccacgagatggtggaaactgaccgtcacattggtatcatcatggaatacgcgtcaggaggtgaattgtttgattacatcttaaataatcgatatctcaaggataattctgcacgccggctgtttgctcagctggtgtccggagttggttatctgcacaagaagggtattgtgcaccgtgatctcaagctggagaacttgctactcgatcggaatcgcaacatcatcattactgacttcggattcgccaacactttcgacccggtcgatcctttagacgaggaaatggagtacaacttgaccaacaaagaatacgtcaaacggaagcgactagacaagattggtccaaatgggctaaggcgaggcgatcttatgcagaccagctgtggtagtccctgctatgcagcccccgagcttgtcgtgagcgattctttatacacaggccggaaggtggatgtgtggagctgtggagtgattttggtaagttttcctacagacagaatccgactcaactaacttgttacagtatgccatgttggcgggatacctacccttcgatgacgacccagcaaacccagatggcgacaacattaatctcctttacaaatatatcgtcactactcctctcacattcccggaatacgtcacgccacatgcgcgcgatttattgagacggatactggttcctgatccccggaaacgtgcagacctgttcgaagttgcccgtcacagctggctcagcgagttctcgaatgtcgtgtctcatatcacaagtagtacgacaaacgttgtggacattgcgaatacaacgatcccatctggtaaggacttgctctctgcgggtggtcaagattcgaattgctcacataagtctatagaaacccaaaaggaagcaccgcctctcgtccgtagtgcctcagtgcgcgaaccacccaagacacatcagcacgctcctgcggttggtggcttgaaccatcatgccggagatgtttctcaagacccgccgtccgaaaagtctagaaccccccgtgatgccaagcgaagaacggtccaagtcgaatacgttgctcctcaatcacaaacgacccgaggagaacctccggtggaaacatctgcatcacgcagccgagtcccggctccatctgaggcccagatcgcagcttcagcgcaacaacccacagagcctgcaactgcaccactcaacctgaacaagccacttccagggcacttgccgcggtcggcctcggaccacgcagccatgacaggttcgcagacgagtgggatgtcgcaagggcatcgaccagccactggtacttccatgagctcctttggaaacactggtcgtttgccttctcgcggctcctatggacagccggtggctcctactgttaccgcaaccaacacagaaggccgcctagcacaacccaagagcaggcaatttgctcttccacaggatcctgcacaggcatcgagcacatctatccgtcgtgcaagcacccagaaccagcaattgcctgcaaccttcaacactactccccgacaagagccgccaaaaggccacaagaggtccaatactgtttccagcctgggcgagaaactgttcggtcgttctggatcaatattgggtggccgttcgcagtcgaatgctactcgtacaaagcaagacaagcgttatcctcctgtcagcatgaaggagcctctaccgagggaaaactccagagtgtctgtggattcccgccgctcgatgcaatacccccataaccgcaagacaagcgagtctggcgcggaaaaccgtcctcgtcgattctcattactcccgcaatccttttcatttcgcggtttctctaatacccgggctccgactcccgaagaaccctcgcagatccctcgtcccgtggacccccgtgtcccgcaacgccctacctcgggccctgccggcccctcgcagggtcgttctcgggcgacaagctatggcacgcaagaagctatggggatagttgacgagggacccggcgaagatgttcataccgaacctgggccgcttagctacgaggcccagattgatcaacagtttgcagacctaggatctcaatttgactatcagagtggttcctttggagtcccctcacctgaggaagtctaccagaactctgcagaccgcattgatcaacaaaatcactcatctaaaccaaactactacgatgattacaatggcccatatgacagcgcgcctaggcagtcgacgcaggttggccggtcaggccgtgggccgggtgttttgcagaaaagccaccgcaaattcgcggacgcctatgaatatgagcgcgacgggtctcaccattccggcagctcgggggctgcacgcaaagtcatggacttcttccgaagacgcgccaagtcccgcggcggcgatgaccgttgattttcggtttagccaatagataaaaagcaatattccatctcaaacggactgaccgcggagattggaccgatcaagcactcttgcggtttgagctttgatcttagaagccgattcaaaccctatcattctgatgcttcttttgagttgcttgaaagagcagcgaggttgtttggataccccgtgataccctgcttttgttcccttcttatgcatggagcgattcctcttcatccgtcgggtgtttgattaattatctagcattttctttatttcctttgtctagctacattttccttgctcctaatgtttcgcttttgttcgctgttccccccgttttacctcaatatgtgatttgcattccccttctactgttactattatctctggctgtaaagtgagacctcatccgtgttcttgttcagaacattttattattcttttgaaccttttttttcgcttctcattgtcccctcttagcttttatttgttcctctacgagaggctctgtccacgataattcaattgtgacattatttccattcttctgtctatgtctatgtaccttaatgtgtggctttgtcctttaaggtggatgtttctggagagttattcaggccttcctattctattgctactctgttactctattactagactacaacaaatgtggtcagtacactgttacttgggaagctccaatatacctcattatcaagcggaagactctatatctcccttcagctgcttgtagttgatgtagtgtaacatgattaacatcagaatacctattccagggtagatactttcaaccgctcaaccttcaccagatcagcctccctattcaagctctcaatctcagccgtagtaaaaggaatgccctccgccaaccgtttctcctcggtgatcatctcaatctccccagggaagtaaatccgatccacaccatccatcctctccgactcaacaacccgccgatagagataatccatcctccccttaaactcctcaatagtcataaacaaatccggcttaatagcgaccaaaaaatgccccacatccgccggcctcgacgggtcatacgggttagtaacatgacccgcaaaagccgacccagaaagcacccccgaaaaaacatccatcataaccgccagcgccgaccccttcggcccccccatcggcaacataacaccccccaaagcctccgccggatcatccgtcctagccccatccttatccagcgcccaatcggtaggaatcctctccccccggcgcaacgccttataaaccttcccccgcgccgcaaccgaaggcgccatatctagtataaacggcctgccctgccccgccggcgccccacacgcaatcggcgacacacccatcagcttctcccgcccaccccacaccggcagcgcaggcgagctgttcgtaaacacgagcgacatcatgtccgcgtctagcgcttgctgcaccagccacgcagacatgccgaagtggttcgagtgcttgacggagaccattccgatgccgaaggtctgcgccattgagatggcgagtttcattccttcgtgcgcggcgacgaagccgaagccgttgtgcgcgtctacttgcgctgctgctggtgttatttgctggattgtgggtgttgcggttgggtctagggctttctgccggattcgttctatgtaggatgggatgcggttgctgccgtgtgtgtctacgccgcggaggtcggcggataggaggcatttggagattatttcggcgtgcggtgggggggtgttgtttgcgatgaggatttgtttgatgaaggtttggagggctggggggttgatgttgtgggtttggtggggttcgttgggttggtcggacattttggatttggattgggtgggtttgatgtgggattttgttgttttagaagctgggttgggtgtgggttgtcctgtagagattcttttatagacgcggggacggatgtgttgcgaaatgcggggccccacgggtttatgaggggtatagccctatttcggagtacttccgaggtttggtgggtatattctataacgaatatatggggtttgagagcttgatattgtcgaacctttcaaaaacaaaggatgttgcgcctgcctacgagatcattacggatatctattgatcctacgacatacacagtactccatactcacggtaaggtgcatggtataagccaataagaattaagtcaaggaatggccgctatgcacatccaacaagggcggtcggtgtaggaaccaacgccaatctcctcaatgcttaccccctgaatacattcaagatcagtaccccttccagcattgaattcccgtccaaatgagtgttccatcgctgcctgatgatctatcagattcagacttcggcgacgttgtgagcaccgaaaacgacgagcttgatctcgaagcaatctcagagccctggcataagtacgatataaaagaaacaccaaacgttttttaccctgtttatctcggagaagtcctcaatgagagatgtctggtcgaacataaaatcggtcatggcggcggctctactgtctagatggcccatgacctctatgataagagggacgtggccctcaaaatcatgtctttaggggactggggggagaacgaataccgcatgcagaacgaaatccttcaaaacgtgcatgatacttcccacctagtgatgtatctagggacttttctcatccctggaagcggtcatagggttctagtattccctttaatgggtccatgcattgtccctattgaaatagaaaaaatgccaatggccagccgtatgttcgctgctcgccaattgttagaagccttggaaagtctacataaagaagaattgtgcaccgtgggaagtcgacctactatattaattttccgttctaatgaaaaatttatagatttaaatgagaggaactgtatgtgggggatgcgtcctctccatcatctcaataggaatgcgaaatacgaggcactcggtcggccactaaagctagctataccatatgtcgaactttgcaagaaggggtagtttgctcggccagttaaggtccccgagaatttacgcacagaggaattctttctcggtgactttggcctagcgaaaaagcttaccgatagcgtgactcaacgaggctatcccccttcgaaatattgttcccctgaacgtcttcacggggaagcgccaagtctgaactcaagtggattcgttaggagtttaggtctactacctgaaaagtggaagggtctttaccctggaggactcgattattggtatgaccaatcgcaaacgcctgatccggatcttgatgttgcctctagaattgcatactttcgtcccgatgctgatccgatcgagcgaaaccatgtggcctctatcatgtccaaagtgctctaatactgtccagagaaacgtccgagtgcaacacagcttttacaggatccatcattcagggccattatggagagatacggttgttgctcctcattatttcgtttcttattcgtcctgtttcctatgctgtaatattatttcttcatgtttagtgctggaacaactgcgaagatcgcatgagtcgcttgaagaataaagtgcatccattcagcttaactatagagtagatgttggagtaattcggttaagtactccgtatattataccgatatgccgaccaccgagatctccatattagggctatatgcaatgacagagaggatagtacagtccaaaatctgatttacgaggattaccatcttcgtccaattacatctcttaatgaacataacttttcggagcgagacaaagttgtcgattgctattgactttgtactgcgctatgacatcatactcggctgtgggcggcgattgccgtgtactcggcaaacatcccaccatgcaaattcacccgtttgccgacgcactatcgaaatcgttaaatatgcaacctagggcgaatgctgtatgcacccgatgccacagtagcaaggtatgttgttcttcatgaatagctcctatcaatactgatagcgatgaagatccgttgcgacctagaaggccggcgaagtggtaaatgtagccgttgcgagcgtataggctatacgtgtcagtaagactgcgtaatgatatatatctcccgaggcctataggctgacgttataggcctcacattggaaagcgaaggagagccctccacgcttcgctctactcgtcacatacaagtatcccgtcgccaagccgagcagtccctgtgacacaggagagcacagcacaggaagcaccctctccctttcgtcatcttggccgtcgggatataacatgtgtgggacctggggatgtcaacggctcgcaacagccgaattccatcgatggcagtcagctcatcctagacataagccaagcttgtcgtcttccatcccccatcatcgcccaagcgcttaccgatttctatttccgtgagctgttctacttcgtcccagttttagatcgtgggcagtccgagatagaaacctctactttgttacagcaatgcctgtgtttcgcgggaagtaccatgcgtcaaacggcagggccagccgagtggaccacgtttgccatttacgggcggatcagaacattgctctttctgaaccacgatccagctccattgaatatgctcagcgctctttgcatcctcagcacctggtttccatattctcctgatgcgatagtgctagacaacccgtggcaatgggctggtatggcaatccgactcgcgattcagttgcacttgcacgagaatgagacgtacagcagattagaggatccaggaagagcgcgcaggatgtggtggtatctctttatcaacgatacattgcagacggcctgctgtgggcgtcctggaatgtttcccctggaaacctctgtgccactgccttttcccagtgacttcaaacatgtcgatctcggatcacgcgttttctgtcagttaacagttctctgtacaaaactcaggaaggttgttgacctggccagagttgacaaggcctcatcagagcaggtgtatctgaacctggatggcctgagagtgtggagagaacagctgcccctcgaaagccaattgttcgacgtcgaaactaggcaaccatacaatcgcgctgtcgctgagctccatatattttacctagtgactgtcattttgacatgcttccttggccgccgggataacccgtcattgttcaaatacgcttcaatggctgcttcatcttgtatttcgcggctatacgaggagattctctatcacgaggatgtccaatacctactggcaatgcatacttgggctaacctcgtcgccggaatcccgcgagctttcggagacagcgatgtattgaatcctgaccgcgacgaggagctcagaatcagcaaacaggtgctggaaattatgagggagaagcatacctccgctacttttgtactcaacaaaatcaacggtctcaacaatatgcgcgcagattcggttcccgctcaagccgataacacgtgcggtgctcttccggtgtctgggcaaattcaactagctcagttgttccctttcccctcgaggttttgccctatgcttaggattctaagaactgcggaagctagcgaaaatcaaccaccggacgcgcttctcactttgcctgaagatagcaatgattggccgatggattggtcttcctttttatttgacggtccaatgagcttctaaaatacggaaatatgatattgctgtgaatactggctttaatagaaagttcatagtactaggcttactagctagaccgtagagttagattctagtgtatctattctctatttgcacattggtaaagcattcaggaaattatcgctggtatacaaacctagtaggcaaataataaatctcactattctatagaatcagtataaaggttagggattgcccccatcaaagaaacacggtctattaattcccccgacggatgaactcgatatttggtgtctcggcaaagttacggctctcgggtttgccgcttcggccattttgtgtcgcatattttcttctaggacttttatataaattgaacataagattctcatctcaaataattcctccagatcactcattagtaaagaacaaatatactatggcatccaatccgaacaccaccggaggcgtgcaactgacgttcctcacaacgggaacggtacgcattagaccctcaatgcgctcgcaaccattgagcaaaatcccgattcttcgacgtctccgagcaatttgcgacagaacatggactgagccattgccagtcggggtattcctcattcgccaccccgaaggtctcttcctcatggacaccgggcaatctccatgctgcaacgacgccggatatctcccacgactggctattttgaacggcttcctaagcgaattcatcatcgagcaccaagacggagtccttgagcaacttcacaagctcggaatcaaggcgactgacctcaaagccgtgattctgacccacctgcacaacgaccacgcgggcggattagaggatctggttgcggaggcacctgacctacctatctacatcagccgtgagcactggaatgcttttggggaacatcctctctttgcaagcatggagggagccacacccaatcattggccaaaggggttctcgccgaagattgtggacctgcaggacagaccacttggaccctggaagcagtcttatcctgtgacagaggatggtagaattgccatcgttgatacgtcgggtcatgttcctgggcatattagtctggtgatttacggcgacggggaagatggacagagtcaggttacatacttcctccctggagacgcaacatatggcttggaccttttggacaaggagcagcccgatgggattaatgacgaccctatgcgtgcttacgaaacgctgaagactatcaagcagtttgctaaggagactgatgtggttgtcttgcctagtcatgacatcaacacacctcgcttgcttgctgagcgagtagtctaccggcctcttgagaaagagtgatcgtgtttcaataccatgtacaatattgtgttatttgagggaggaagctatgtactaatatcggactaatgtatctgaaagggaagaaattggaatattttcgcttttgtaacgaagtagcctgcataatatccgactgcatactgctctatctgtatgaatcctgaaaatctgaagccaccagctccgccgattatggaaacaacagttgccttctccacagggtctactcttagtgcggaaagaaacccgaactcggaccgagctcactgtggcaaagccgataccgactgccgacttccacctagcggcgcaaagccagtggcgaaaccctggccgaaagaacatgagccgctcgccacccggttttcggtaagaacccgtggaaatcaataattaagcataacctgaaacaataggagattagaatagccggagatttaacatattcagaatccctataacgtagcatataacgcttcacaacccaaaattccaccgtgacataaaagctcattgtaatagtcagagcgacaggcgggcaagggggatcagttgtatcgtcatttctgaaagccggaggatggaatatccgtagcctgacccataataccgagagcgacaaggcgaaggccctcgtcgtaaagggattcgagatagtgtaggcggatatctgagatctagcgagtcttgaaacagcctttcatggtacctgtgcgatatttgccacgacggactactaggagaacttctggacgaaattctggtccatagagatcgggtatacgtaaggtaaagtagttagcaacatgcaagagaagagaaagatgatatgaaggattggcaaaactaggtgagaggaaaaatatatatcgaaggggatggcagccatcaatcaagtcatgtagctggaccagttctaagacccttctcgacgacctcaatatctcggagcagttcctccgcggattcgtattccttcaaccaacacttccaagtaatagcactgcacgcatgtgaatcccgtgggaactgctgcttttcaaacctctgttcataccacccatcttccccatcgacaatgtcaggaaacaccgaataccccatcatgatcaagtagatagtacaacccagcgcaaagagatctgttttgacatccgcatcaaaaggatcggcccgagggcagtagaatctgacgggctccccgcttccgccatcaagcagtactgttccatcgctcgatagttgtttcccttggaaatccgacagcttgatatgaagatcctcatcgaggagaatatttccaggctggatatcacagtgaatgacgccctgagcatggatccatgcaactgcctcggtagcctctcgacaccaggataactgctgctggatcgaagggggggcgttgtctgattcgaggagatagtagcctaaggttccgtttacagctcgctcgaggtagagccccttatcggagaagcccctgaatcctattatgcgttcatgggacccgacaatttcgaaaagctttttctcgatttcgagacgactcatgtctccgccaggggcgagaggatatttcatgaccgtcaaatcatccacttctccaatgaacgcactgctccccgaggcgatgaccttcttcacccctggggggcagtaatgcctgtatataacaacttctgcgtcgtccaacatggcgagtcgagggaagaaaaatgttatatggaaaaggtttggtaagctcagtatttggggtgatagaattgcgagttgaaagaaaccctacaatgaacagttaaggcgcgtgatgttgctcgggcgggggatggtgcaccggacaatcgaaatgattggctggtattgccagcagaaagttggcttgatcgagtaactagatttcaaggtgtattagcttcttaataatggtttatctcctataatagttaactagataaacaatcggggtcgattctcttctagtgatatgatcacaaaacaaactaaatactgtagtagtacatctatgcgtggacagttaaaagggtatagaaagaaggaaacagtagtagcctctacgtattcgctacacattagatgaaactacatattaggggaattgacgaggcattaaatacattgggatagctaaagtggtaaactgcattcaccgatggcgagatgaattacgcagttgacagcaccatacatattggactcagtacaaaacaatttacctcagctatagtccacgcgcagtacctaatcctcacaccaccagccgaacgaagtccatcccaaaaaatcttcacagttcgtggacatgatcacgtccggccatggccttcctttcatctaagaaccgtcagtcattcaggcacttcgaattttgatctgtttagcatacgtacatatcaacgactttctctaacactttgggcatatatggcccggaaccctgacaaccgaggttgccaagtatacatccttgtatcccgtgcagttgctaccaccgggctgggggcactggaccattgcaatctcttctttttcatgctttggggtagcagtacagttttgatactttctgcgggcaatacgtcgttcgcatccgcaagccatgatgatattcagaccgtaagttgttcttgaccgaaaggcaatagaagttaaagtgtagagccagtggccagaggataattggatgatagtagagcgatagttgagcaaaagctttgtgattctcatgttgacatcggaattatgatgcctttatatattcatctcgcaaagtctccctcgagctgaggggtcagtgcagcttatggtcaacaccattatctagcttgatgaatgaatcacgaccatgtccgcgatgtattgtcttctcccccgcatgatcatattggctatctccctagtgtcatgtaaagtgttgactatgcatctctctcgtcatctagaccggatatagcctctgatacgcctcctccaattacctttcggtattcgacgagctaaagatctgatcatgtacattattggctatgactaagactacgatagaaaaccgaattacagacttttccagttgaattcaacccattccaggaatctccaaatctttccatctagttttattctctttatccggactacagtaacatataggaaagtagaatgattctaagtctaacactgtccgtccacttctctgagaggaacgccttatcagtgctccaagggactctagttctcataaaactgttctcgagagttcttcagttatccattgccccgtatattggtgaatcaacatccttctgcttctctcctttttctacgccgagtcgtatggcctctaagattggataaaccgcatctactccaacataccaaaatattcaacattaagtcctaacatttgactgcgtagacttggttggtcttggttggaattgttttccatatccaattcgtagcagtgccagcctgggggagaaaagtatgtccgctatcctcgccccaccattttgtgcccctcttcgtgagaggaaacagttactaccatcttttacccttcaattcttgagattacgatgcgagatgccttttcatcatttgacagatgctatgcattgatacccgattgacccgactatttgtgattttgaagacttgattgttcctgcctcagaccatacgacgacacacagcccattgcttctcatcaaccaaccgacacatcacaagaggagaaaaaaccaggatatacaaaagctggttacaaggtcctacatcttgcgaactaaaataacacgaggcgaacttttcgccgcggttgtgtacttcagtataatcaatcttatcattcaaagtcagtttctctttagaaaacccaactgttactggaggaattccattattgctcataattggccccgagctaacgtgccacttcagccatgatcgaccaggtgcgcaagtacaagcttgatcctattccacgaggaaatcttacaggggtagtgaaccgaaatgtatgtactctagagttggagactggataatgctaattatttgcagctaaaccgtgacgattgtgaaaatatagaatggactgcccttccgaaagcaacccgaatgaagcctcctccgaaagccatcgccgttattgttgatgtcatagaaagccaaggtgccatccacatcaccgacgatgacggatcatacattgatatggtaggaactgaatttgctggccatttggtgcttgtcccgtgggataaaagctggtttttgagggcatctggatcgattgaagtgggatatgttatcgtttaggagaggacatgatataaatcactcgataactctttgacgatttatgattaaggaatctgtcaactccctagatattgggattgtgacgaaggacgattgatatctgttgtaggggtcggttaggcgcattatgccggtgatttggcctggcatcgccgcgatttttttcagatcgtccatggagacctcataaacatcaccatgaacagaggtaagggtggcgtctttccttggtcagccttagtcacagaggagtaaagatcgtttacctcgagtcactccgtcagctagcttctcaaagacgtcgagctccaattcattccatttttcggacagcttagaaggcaaatatacgcgctcctcatctctcatgttcgcaatggcagaaggtcccaatccagccgcacaaagaacaacccctgtgtcgccgtgcttcttccttatgttccgttgagtctccagatatgttgttctttacttagcacctttcgcatccgttgaaggtcgtccatttgttaggagctgaaaagcatcgtcaactcgcttttgttcagagtctttcagataggtacggtgatgcgttaactttgagaacttcaagagcttcgccacggcctcgtctgcagttaggctttgcgaaggcatctatctgctcttcgttcattaagagataatgaaaatgattatcactggagtatatactgtatgtgggaccaagcttagatgtaatcagaaagaggcgagatctctctagaacaagtgaaaaatgcttgaaggttgttgaaatccgttggcaacagctggaaacagttgtaaagttttggccctgattccagccatgcagaaatccatggaaacttatggaaatgtcgaatcgtcaagaagaccaatcatagtttgaaatgatgaaacaaggaggcagacatggtgcatgaagcctcaaagtatacgacttcagcgatacgcgcggggtaatgagaatatctgatctgaattacctggaactataatggaaattatgattcacagaagacattgctatcgcaagtttctactttatttctttagttgtctcttccaaacaaccccagggccaaacgaatccctccgtccctgtatgcaatcgatggccgccatctgtaatattttaggagctagaaatctgcgattgagcatgtatcaacataatgcttgcgcattccgtcacgcattaacatatagcagacagaagcagatttgtgtgattggcgaggaaagagaaatgttcgttgtttcccagtctatgcgcctgacaaggaaggaaagtcaccttcagcgtgttcacgagcattttgagcattacaaaatctctataaggggactgagactgatagcttataactaaaacggtatgcaataatgttaagattacattttattactgaagttatatagttaggtgtaactagtgaagaggggacccctaaggggcaccgacagccctgtctgcgaaacaggtatgagagcagagtcgtcactgggagtagtagggtgctagagnnnnnnnnnnnnnnnnnnnnttagtttaattaatttaatggcgttttggttgaaatatatgccttagaaaactatactcttgggtggggtggcgactcgtttacagtggcgactcgtttaccgattatgttaatgtattttaccaccgagccgccaccaccaccgagccgccacctcaccctaatatattgaattgaaatgtatatatctctaccaaaacaccattaaattgaatcaactaacaactggtctatctggatatgtttctcttctatgccctggcaatctgtatattccacacccccgggggggccgtgtatgtggctgaatagttgattctctaggtatgctggggccggggggaggtactttaattacttcttgttgctgtataattaatgcagaggcttcttgaactgaaaggccttcttcggtgggtatttgcctctgggatctagtatgcttttgcttctgcttctcgttggcggtgtgtaattccttgttttctttggcgagtaggatagtaccttgtattataagacggaagccttttataagctggtttaatgtacgatctgacgggctaggtaggcttcgagatcttatataaagtagagctttaattaataaagcctgccgatatagatctttctctgtaactagtgtttttggtataaaatttcgacttgattcgctttcccggctaggggggggggttagggttcgaagctgaatattaagctttgaaatcactctttctaggttaaaagggactaaaccagctattctaaagctattcttaattgtctccgatttaaaagctttaattcgtataagagggtatactttaaggaagtcaagtttattaatataattaaacccgttctgtatcttgattttaactatccgaccgtaggtatattttaataccgcaaaataactaatatctagaggttataaaagataagataaatgcgctggtatatagattagtatcaccttattttacttataaatttcgttaaatttaggtattaaataacttctgtggctattaagaattaaaagccggtataccccctttatacgcgaagtactaggaataaagagcttcttaagctaacgaagtctaatcttatcagaggtctagctattaggactaactttaaagcgctaatcctctaggaggctgttaaactaagatttaataaagactttgcctttaaaaatcatatatagaggaagtgcctacctagaagtattcgtacattcaattgtagttacctactcgcgatttctaggttataaaagtgatctctaaccgtagtatttacttctagttataacctttactgttatagtcaatcctatagtaaaacctatcttattaaagttataaatgttatctagatcaattctatactaaagaatagttttttgaactagattaaactactccccaatgattttagggtcttcgcatttcgtatacttgtaattatactgtttcgagaattaggaggagaggagaggatatcgttttacaaatttcgtaacccaattttagctaactgaaagaactggggtagttccacacttttgaagaagaaggtccgccatttcttatactatagagggcctaggggctgctctacgtagatctatagagagaatccattttttaagagattcttccttagtctctgttaatttatatgaatttgcgcgtgtaatgcttcgttcggtatggccgtcaagacgattgtatagggtagaacggggtatattgaaagtacaggcagtggcagtaatagtacgaatttcttgcttcttaatagcctaaatagctaataaaagcctaccctcttgctctattgaatttttagagctttaggagcgaattggtggcatagtgggtggttgaagaagaagggattaaattaattgacgcgttttgggtgaggtggcggctcggtggtggtggcggctcggtggtgaaatacgttaacgtaattcacatacgagccgccactacatacgacccgccatccnnnnnnnnnnnnnnnnnnnnnnnnnnnnnnnnnnnnnnnnnnnnnnnnnnnnnnnnnnnnnnnnnnnnnnnnnnnnnnnnnnnnnnnnnnnnnnnnnnnnnnnnnnnnnnnnnnnnnnnnnnnnnnnnnnnnnnnnnnnnnnnnnnnnnnnnnnnnnnnnnnnnnnnnnnnnnnnnnnnnnnnnnnnnnnnnnnnnnnnnnnnnnnnnnnnnnnnnnnnnnnnnnnnnnnnnnnnnnnnnnnnnnnnnnnnnnnnnnnnnnnnnnnnnnnnnnnnnnnnnnnnnnnnnnnnnnnnnnnnnnnnnnnnnnnnnnnnnnnnnnnnnnnnnnnnnnnnnnnnnnnnnnnnnnnnnnnnnnnnnnnnnnnnnnnnnnnnnnnnnnnnnnnnnnnnnnnnnnnnnnnnnnnnnnnnnnnnnnnnnnnnnnnnnnnnnnnnnnnnnnnnnnnnnnnnnnnnnnnnnnnnnnnnnnnnnnnnnnnnnnnnnnnnnnnnnnnnnnnnnnnnnnnnnnnnnnnnnnnnnnnnnnnnnnnnnnnnnnnnnnnnnnnnnnnnnnnnnnnnnnnnnnnnnnnnnnnnnnnnnnnnnnnnnnnnnnnnnnnnnnnnnnnnnnnnnnnnnnnnnnnnnnnnnnnnnnnnnnnnnnnnnnnnnnnnnnnnnnnnnnnnnnnnnnnnnnnnnnnnnnnnnnnnnnnnnnnnnnnnnnnnnnnnnnnnnnnnnnnnnnnnnnnnnnnnnnnnnnnnnnnnnnnnnnnnnnnnnnnnnnnnnnnnnnnnnnnnnnnnnnnnnnnnnnnnnnnnnnnnnnnnnnnnnnnnnnnnnnnnnnnnnnnnnnnnnnnnnnnnnnnnnnnnnnnnnnnnnnnnnnnnnnnnnnnnnnnnnnnnnnnnnnnnnnnnnnnnnnnnnnnnnnnnnnnnnnnnnnnnnnnnnnnnnnnnnnnnnnnnnnnnnnnnnnnnnnnnnnnnnnnnnnnnnnnnnnnnnnnnnnnnnnnnnnnnnnnnnnnnnnnnnnnnnnnnnnnnnnnnnnnnnnnnnnnnnnnnnnnnnnnnnnnnnnnnnnnnnnnnnnnnnnnnnnnnnnnnnnnnnnnnnnnnnnnnnnnnnnnnnnnnnnnnnnnnnnnnnnnnnnnnnnnnnnnnnnnnnnnnnnnnnnnnnnnnnnnnnnnnnnnnnnnnnnnnnnnnnnnnnnnnnnnnnnnnnnnnnnnnnnnnnnnnnnnnnnnnnnnnnnnnnnnnnnnnnnnnnnnnnnnnnnnnnnnnnnnnnnnnnnnnnnnnnnnnnnnnnnnnnnnnnnnnnnnnnnnnnnnnnnnnnnnnnnnnnnnnnnnnnnnnnnnnnnnnnnnnnnnnnnnnnnnnnnnnnnnnnnnnnnnnnnnnnnnnnnnnnnnnnnnnnnnnnnnnnnnnnnnnnnnnnnnnnnnnnnnnnnnnnnnnnnnnnnnnnnnnnnnnnnnnnnnnnnnnnnnnnnnnnnnnnnnnnnnnnnnnnnnnnnnnnnnnnnnnnnnnnnnnnnnnnnnnnnnnnnnnnnnnnnnnnnnnnnnnnnnnnnnnnnnnnnnnnnnnnnnnnnnnnnnnnnnnnnnnnnnnnnnnnnnnnnnnnnnnnnnnnnnnnnnnnnnnnnnnnnnnnnnnnnnnnnnnnnnnnnnnnnnnnnnnnnnnnnnnnnnnnnnnnnnnnnnnnnnnnnnnnnnnnnnnnnnnnnnnnnnnnnnnnnnnnnnnnnnnnnnnnnnnnnnnnnnnnnnnnnnnnnnnnnnnnnnnnnnnnnnnnnnnnnnnnnnnnnnnnnnnnnnnnnnnnnnnnnnnnnnnnnnnnnnnnnnnnnnnnnnnnnnnnnnnnnnnnnnnnnnnnnnnnnnnnnnnnnnnnnnnnnnnnnnnnnnnnnnnnnnnnnnnnnnnnnnnnnnnnnnnnnnnnnnnnnnnnnnnnnnnnnnnnnnnnnnnnnnnnnnnnnnnnnnnnnnnnnnnnnnnnnnnnnnnnnnnnnnnnnnnnnnnnnnnnnnnnnnnnnnnnnnnnnnnnnnnnnnnnnnnnnnnnnnnnnnnnnnnnnnnnnnnnnnnnnnnnnnnnnnnnnnnnnnnnnnnnnnnnnnnnnnnnnnnnnnnnnnnnnnnnnnnnnnnnnnnnnnnnnnnnnnnnnnnnnnnnnnnnnnnnnnnnnnnnnnnnnnnnnnnnnnnnnnnnnnnnnnnnnnnnnnnnnnnnnnnnnnnnnnnnnnnnnnnnnnnnnnnnnnnnnnnnnnnnnnnnnnnnnnnnnnnnnnnnnnnnnnnnnnnnnnnnnnnnnnnnnnnnnnnnnnnnnnnnnnnnnnnnnnnnnnnnnnnnnnnnnnnnnnnnnnnnnnnnnnnnnnnnnnnnnnnnnnnnnnnnnnnnnnnnnnnnnnnnnnnnnnnnnnnnnnnnnnnnnnnnnnnnnnnnnnnnnnnnnnnnnnnnnnnnnnnnnnnnnnnnnnnnnnnnnnnnnnnnnnnnnnnnnnnnnnnnnnnnnnnnnnnnnnnnnnnnnnnnnnnnnnnnnnnnnnnnnnnnnnnnnnnnnnnnnnnnnnnnnnnnnnnnnnnnnnnnnnnnnnnnnnnnnnnnnnnnnnnnnnnnnnnnnnnnnnnnnnnnnnnnnnnnnnnnnnnnnnnnnnnnnnnnnnnnnnnnnnnnnnnnnnnnnnnnnnnnnnnnnnnnnnnnnnnnnnnnnnnnnnnnnnnnnnnnnnnnnnnnnnnnnnnnnnnnnnnnnnnnnnnnnnnnnnnnnnnnnnnnnnnnnnnnnnnnnnnnnnnnnnnnnnnnnnnnnnnnnnnnnnnnnnnnnnnnnnnnnnnnnnnnnnnnnnnnnnnnnnnnnnnnnnnnnnnnnnnnnnnnnnnnnnnnnnnnnnnnnnnnnnnnnnnnnnnnnnnnnnnnnnnnnnnnnnnnnnnnnnnnnnnnnnnnnnnnnnnnnnnnnnnnnnnnnnnnnnnnnnnnnnnnnnnnnnnnnnnnnnnnnnnnnnnnnnnnnnnnnnnnnnnnnnnnnnnnnnnnnnnnnnnnnnnnnnnnnnnnnnnnnnnnnnnnnnnnnnnnnnnnnnnnnnnnnnnnnnnnnnnnnnnnnnnnnnnnnnnnnnnnnnnnnnnnnnnnnnnnnnnnnnnnnnnnnnnnnnnnnnnnnnnnnnnnnnnnnnnnnnnnnnnnnnnnnnnnnnnnnnnnnnnnnnnnnnnnnnnnnnnnnnnnnnnnnnnnnnnnnnnnnnnnnnnnnnnnnnnnnnnnnnnnnnnnnnnnnnnnnnnnnnnnnnnnnnnnnnnnnnnnnnnnnnnnnnnnnnnnnnnnnnnnnnnnnnnnnnnnnnnnnnnnnnnnnnnnnnnnnnnnnnnnnnnnnnnnnnnnnnnnnnnnnnnnnnnnnnnnnnnnnnnnnnnnnnnnnnnnnnnnnnnnnnnnnnnnnnnnnnnnnnnnnnnnnnnnnnnnnnnnnnnnnnnnnnnnnnnnnnnnnnnnnnnnnnnnnnnnnnnnnnnnnnnnnnnnnnnnnnnnnnnnnnnnnnnnnnnnnnnnnnnnnnnnnnnnnnnnnnnnnnnnnnnnnnnnnnnnnnnnnnnnnnnnnnnnnnnnnnnnnnnnnnnnnnnnnnnnnnnnnnnnnnnnnnnnnnnnnnnnnnnnnnnnnnnnnnnnnnnnnnnnnnnnnnnnnnnnnnnnnnnnnnnnnnnnnnnnnnnnnnnnnnnnnnnnnnnnnnnnnnnnnnnnnnnnnnnnnnnnnnnnnnnnnnnnnnnnnnnnnnnnnnnnnnnnnnnnnnnnnnnnnnnnnnnnnnnnnnnnnnnnnnnnnnnnnnnnnnnnnnnnnnnnnnnnnnnnnnnnnnnnnnnnnnnnnnnnnnnnnnnnnnnnnnnnnnnnnnnnnnnnnnnnnnnnnnnnnnnnnnnnnnnnnnnnnnnnnnnnnnnnnnnnnnnnnnnnnnnnnnnnnnnnnnnnnnnnnnnnnnnnnnnnnnnnnnnnnnnnnnnnnnnnnnnnnnnnnnnnnnnnnnnnnnnnnnnnnnnnnnnnnnnnnnnnnnnnnnnnnnnnnnnnnnnnnnnnnnnnnnnnnnnnnnnnnnnnnnnnnnnnnnnnnnnnnnnnnnnnnnnnnnnnnnnnnnnnnnnnnnnnnnnnnnnnnnnnnnnnnnnnnnnnnnnnnnnnnnnnnnnnnnnnnnnnnnnnnnnnnnnnnnnnnnnnnnnnnnnnnnnnnnnnnnnnnnnnnnnnnnnnnnnnnnnnnnnnnnnnnnnnnnnnnnnnnnnnnnnnnnnnnnnnnnnnnnnnnnnnnnnnnnnnnnnnnnnnnnnnnnnnnnnnnnnnnnnnnnnnnnnnnnnnnnnnnnnnnnnnnnnnnnnnnnnnnnnnnnnnnnnnnnnnnnnnnnnnnnnnnnnnnnnnnnnnnnnnnnnnnnnnnnnnnnnnnnnnnnnnnnnnnnnnnnnnnnnnnnnnnnnnnnnnnnnnnnnnnnnnnnnnnnnnnnnnnnnnnnnnnnnnnnnnnnnnnnnnnnnnnnnnnnnnnnnnnnnnnnnnnnnnnnnnnnnnnnnnnnnnnnnnnnnnnnnnnnnnnnnnnnnnnnnnnnnnnnnnnnnnnnnnnnnnnnnnnnnnnnnnnnnnnnnnnnnnnnnnnnnnnnnnnnnnnnnnnnnnnnnnnnnnnnnnnnnnnnnnnnnnnnnnnnnnnnnnnnnnnnnnnnnnnnnnnnnnnnnnnnnnnnnnnnnnnnnnnnnnnnnnnnnnnnnnnnnnnnnnnnnnnnnnnnnnnnnnnnnnnnnnnnnnnnnnnnnnnnnnnnnnnnnnnnnnnnnnnnnnnnnnnnnnnnnnnnnnnnnnnnnnnnnnnnnnnnnnnnnnnnnnnnnnnnnnnnnnnnnnnnnnnnnnnnnnnnnnnnnnnnnnnnnnnnnnnnnnnnnnnnnnnnnnnnnnnnnnnnnnnnnnnnnnnnnnnnnnnnnnnnnnnnnnnnnnnnnnnnnnnnnnnnnnnnnnnnnnnnnnnnnnnnnnnnnnnnnnnnnnnnnnnnnnnnnnnnnnnnnnnnnnnnnnnnnnnnnnnnnnnnnnnnnnnnnnnnnnnnnnnnnnnnnnnnnnnnnnnnnnnnnnnnnnnnnnnnnnnnnnnnnnnnnnnnnnnnnnnnnnnnnnnnnnnnnnnnnnnnnnnnnnnnnnnnnnnnnnnnnnnnnnnnnnnnnnnnnnnnnnnnnnnnnnnnnnnnnnnnnnnnnnnnnnnnnnnnnnnnnnnnnnnnnnnnnnnnnnnnnnnnnnnnnnnnnnnnnnnnnnnnnnnnnnnnnnnnnnnnnnnnnnnnnnnnnnnnnnnnnnnnnnnnnnnnnnnnnnnnnnnnnnnnnnnnnnnnnnnnnnnnnnnnnnnnnnnnnnnnnnnnnnnnnnnnnnnnnnnnnnnnnnnnnnnnnnnnnnnnnnnnnnnnnnnnnnnnnnnnnnnnnnnnnnnnnnnnnnnnnnnnnnnnnnnnnnnnnnnnnnnnnnnnnnnnnnnnnnnnnnnnnnnnnnnnnnnnnnnnnnnnnnnnnnnnnnnnnnnnnnnnnnnnnnnnnnnnnnnnnnnnnnnnnnnnnnnnnnnnnnnnnnnnnnnnnnnnnnnnnnnnnnnnnnnnnnnnnnnnnnnnnnnnnnnnnnnnnnnnnnnnnnnnnnnnnnnnnnnnnnnnnnnnnnnnnnnnnnnnnnnnnnnnnnnnnnnnnnnnnnnnnnnnnnnnnnnnnnnnnnnnnnnnnnnnnnnnnnnnnnnnnnnnnnnnnnnnnnnnnnnnnnnnnnnnnnnnnnnnnnnnnnnnnnnnnnnnnnnnnnnnnnnnnnnnnnnnnnnnnnnnnnnnnnnnnnnnnnnnnnnnnnnnnnnnnnnnnnnnnnnnnnnnnnnnnnnnnnnnnnnnnnnnnnnnnnnnnnnnnnnnnnnnnnnnnnnnnnnnnnnnnnnnnnnnnnnnnnnnnnnnnnnnnnnnnnnnnnnnnnnnnnnnnnnnnnnnnnnnnnnnnnnnnnnnnnnnnnnnnnnnnnnnnnnnnnnnnnnnnnnnnnnnnnnnnnnnnnnnnnnnnnnnnnnnnnnnnnnnnnnnnnnnnnnnnnnnnnnnnnnnnnnnnnnnnnnnnnnnnnnnnnnnnnnnnnnnnnnnnnnnnnnnnnnnnnnnnnnnnnnnnnnnnnnnnnnnnnnnnnnnnnnnnnnnnnnnnnnnnnnnnnnnnnnnnnnnnnnnnnnnnnnnnnnnnnnnnnnnnnnnnnnnnnnnnnnnnnnnnnnnnnnnnnnnnnnnnnnnnnnnnnnnnnnnnnnnnnnnnnnnnnnnnnnnnnnnnnnnnnnnnnnnnnnnnnnnnnnnnnnnnnnnnnnnnnnnnnnnnnnnnnnnnnnnnnnnnnnnnnnnnnnnnnnnnnnnnnnnnnnnnnnnnnnnnnnnnnnnnnnaataaagaatagggacttcttagttatatcctaagggagtattaatactataaaatctactatcggtaggtattctaactaattatcctagttctattctatatagggttataatcgctacgctatatactagttagcaatttcactttatctatctgtctaagggtaatatatggttaataactttctttttatacctaggatttaatagaacttagtctagaattctaagataaactaacctccttaatcagagataattatatctaggattcctgtgatctaaataatataatctacaaataagtatactatagcttttatatctatttccttctaataaggaattaatattagtcgcttacttaaacggtctactactataaatatagtattatatctgtagtaatcttttaggaaagatctaaaatctattataatatattactatagttattccggtactagtagggaatatagtagtcctaaagtataatctctctatacctttattcttttataaattaagtagttattaacgtaatacttaatatctgttatctatcctagctaataatattattctaataccaatttctttagcttcttaattcctaggtatataattaacagttattaatatatctcattaagaagccttatataaagatctcctttattaggaacctcgagttagttcttaaaaagtaatagtctattataaagtatctactttagattacttccttcaatagctatctatcggaatagtttaagtttagtattttattagttagcttattttatatagtttataatcttaggatcttctagtttaattagtaagagctctataagatatacacctttcttaaagtatttgacggaaaaacggtggtaaggcgagtgtattttgtggcagaaaaatcttaataaattctctaactctctaaaactgacaatagtcctaaaacatgacaatctgatggacaacttagtaatcaaaacaaacaaaacaannnnnnnnnnnnnnnnnnnnnnnnnnnnnnnnnnnnnnnnnnnnnnnnnnnnnnnnnnnnnnnnnnnnnnnnnnnnnnnnnnnnnnnnnnnnnnnnnnnnnnnnnnnnnnnnnnnnnnnnnnnnnnnnnnnnnnnnnnnnnnnnnnnnnnnnnnnnnnnnnnnnnnnnnnnnnnnnnnnnnnnnnnnnnnnnnnnnnnnnnnnnnnnnnnnnnnnnnnnnnnnnnnnnnnnnnnnnnnnnnnnnnnnnnnnnnnnnnnnnnnnnnnnnnnnnnnnnnnnnnnnnnnnnnnnnnnnnnnnnnnnnnnnnnnnnnnnnnnnnnnnnnnnnnnnnnnnnnnnnnnnnnnnnnnnnnnnnnnnnnnnnnnnnnnnnnnnnnnnnnnnnnnnnnnnnnnnnnnnnnnnnnnnnnnnnnnnnnnnnnnnnnnnnnnnnnnnnnnnnnnnnnnnnnnnnnnnnnnnnnnnnnnnnnnnnnnnnnnnnnnnnnnnnnnnnnnnnnnnnnnnnnnnnnnnnnnnnnnnnnnnnnnnnnnnnnnnnnnnnnnnnnnnnnnnnnnnnnnnnnnnnnnnnnnnnnnnnnnnnnnnnnnnnnnnnnnnnnnnnnnnnnnnnnnnnnnnnnnnnnnnnnnnnnnnnnnnnnnnnnnnnnnnnnnnnnnnnnnnnnnnnnnnnnnnnnnnnnnnnnnnnnnnnnnnnnnnnnnnnnnnnnnnnnnnnnnnnnnnnnnnnnnnnnnnnnnnnnnnnnnnnnnnnnnnnnnnnnnnnnnnnnnnnnnnnnnnnnnnnnnnnnnnnnnnnnnnnnnnnnnnnnnnnnnnnnnnnnnnnnnnnnnnnnnnnnnnnnnnnnnnnnnnnnnnnnnnnnnnnnnnnnnnnnnnnnnnnnnnnnnnnnnnnnnnnnnnnnnnnnnnnnnnnnnnnnnnnnnnnnnnnnnnnnnnnnnnnnnnnnnnnnnnnnnnnnnnnnnnnnnnnnnnnnnnnnnnnnnnnnnnnnnnnnnnnnnnnnnnnnnnnnnnnnnnnnnnnnnnnnnnnnnnnnnnnnnnnnnnnnnnnnnnnnnnnnnnnnnnnnnnnnnnnnnnnnnnnnnnnnnnnnnnnnnnnnnnnnnnnnnnnnnnnnnnnnnnnnnnnnnnnnnnnnnnnnnnnnnnnnnnnnnnnnnnnnnnnnnnnnnnnnnnnnnnnnnnnnnnnnnnnnnnnnnnnnnnnnnnnnnnnnnnnnnnnnnnnnnnnnnnnnnnnnnnnnnnnnnnnnnnnnnnnnnnnnnnnnnnnnnnnnnnnnnnnnnnnnnnnnnnnnnnnnnnnnnnnnnnnnnnnnnnnnnnnnnnnnnnnnnnnnnnnnnnnnnnnnnnnnnnnnnnnnnnnnnnnnnnnnnnnnnnnnnnnnnnnnnnnnnnnnnnnnnnnnnnnnnnnnnnnnnnnnnnnnnnnnnnnnnnnnnnnnnnnnnnnnnnnnnnnnnnnnnnnnnnnnnnnnnnnnnnnnnnnnnnnnnnnnnnnnnnnnnnnnnnnnnnnnnnnnnnnnnnnnnnnnnnnnnnnnnnnnnnnnnnnnnnnnnnnnnnnnnnnnnnnnnnnnnnnnnnnnnnnnnnnnnnnnnnnnnnnnnnnnnnnnnnnnnnnnnnnnnnnnnnnnnnnnnnnnnnnnnnnnnnnnnnnnnnnnnnnnnnnnnnnnnnnnnnnnnnnnnnnnnnnnnnnnnnnnnnnnnnnnnnnnnnnnnnnnnnnnnnnnnnnnnnnnnnnnnnnnnnnnnnnnnnnnnnnnnnnnnnnnnnnnnnnnnnnnnnnnnnnnnnnnnnnnnnnnnnnnnnnnnnnnnnnnnnnnnnnnnnnnnnnnnnnnnnnnnnnnnnnnnnnnnnnnnnnnnnnnnnnnnnnnnnnnnnnnnnnnnnnnnnnnnnnnnnnnnnnnnnnnnnnnnnnnnnnnnnnnnnnnnnnnnnnnnnnnnnnnnnnnnnnnnnnnnnnnnnnnnnnnnnnnnnnnnnnnnnnnnnnnnnnnnnnnnnnnnnnnnnnnnnnnnnnnnnnnnnnnnnnnnnnnnnnnnnnnnnnnnnnnnnnnnnnnnnnnnnnnnnnnnnnnnnnnnnnnnnnnnnnnnnnnnnnnnnnnnnnnnnnnnnnnnnnnnnnnnnnnnnnnnnnnnnnnnnnnnnnnnnnnnnnnnnnnnnnnnnnnnnnnnnnnnnnnnnnnnnnnnnnnnnnnnnnnnnnnnnnnnnnnnnnnnnnnnnnnnnnnnnnnnnnnnnnnnnnnnnnnnnnnnnnnnnnnnnnnnnnnnnnnnnnnnnnnnnnnnnnnnnnnnnnnnnnnnnnnnnnnnnnnnnnnnnnnnnnnnnnnnnnnnnnnnnnnnnnnnnnnnnnnnnnnnnnnnnnnnnnnnnnnnnnnnnnnnnnnnnnnnnnnnnnnnnnnnnnnnnnnnnnnnnnnnnnnnnnnnnnnnnnnnnnnnnnnnnnnnnnnnnnnnnnnnnnnnnnnnnnnnnnnnnnnnnnnnnnnnnnnnnnnnnnnnnnnnnnnnnnnnnnnnnnnnnnnnnnnnnnnnnnnnnnnnnnnnnnnnnnnnnnnnnnnnnnnnnnnnnnnnnnnnnnnnnnnnnnnnnnnnnnnnnnnnnnnnnnnnnnnnnnnnnnnnnnnnnnnnnnnnnnnnnnnnnnnnnnnnnnnnnnnnnnnnnnnnnnnnnnnnnnnnnnnnnnnnnnnnnnnnnnnnnnnnnnnnnnnnnnnnnnnnnnnnnnnnnnnnnnnnnnnnnnnnnnnnnnnnnnnnnnnnnnnnnnnnnnnnnnnnnnnnnnnnnnnnnnnnnnnnnnnnnnnnnnnnnnnnnnnnnnnnnnnnnnnnnnnnnnnnnnnnnnnnnnnnnnnnnnnnnnnnnnnnnnnnnnnnnnnnnnnnnnnnnnnnnnnnnnnnnnnnnnnnnnnnnnnnnnnnnnnnnnnnnnnnnnnnnnnnnnnnnnnnnnnnnnnnnnnnnnnnnnnnnnnnnnnnnnnnnnnnnnnnnnnnnnnnnnnnnnnnnnnnnnnnnnnnnnnnnnnnnnnnnnnnnnnnnnnnnnnnnnnnnnnnnnnnnnnnnnnnnnnnnnnnnnnnnnnnnnnnnnnnnnnnnnnnnnnnnnnnnnnnnnnnnnnnnnnnnnnnnnnnnnnnnnnnnnnnnnnnnnnnnnnnnnnnnnnnnnnnnnnnnnnnnnnnnnnnnnnnnnnnnnnnnnnnnnnnnnnnnnnnnnnnnnnnnnnnnnnnnnnnnnnnnnnnnnnnnnnnnnnnnnnnnnnnnnnnnnnnnnnnnnnnnnnnnnnnnnnnnnnnnnnnnnnnnnnnnnnnnnnnnnnnnnnnnnnnnnnnnnnnnnnnnnnnnnnnnnnnnnnnnnnnnnnnnnnnnnnnnnnnnnnnnnnnnnnnnnnnnnnnnnnnnnnnnnnnnnnnnnnnnnnnnnnnnnnnnnnnnnnnnnnnnnnnnnnnnnnnnnnnnnnnnnnnnnnnnnnnnnnnnnnnnnnnnnnnnnnnnnnnnnnnnnnnnnnnnnnnnnnnnnnnnnnnnnnnnnnnnnnnnnnnnnnnnnnnnnnnnnnnnnnnnnnnnnnnnnnnnnnnnnnnnnnnnnnnnnnnnnnnnnnnnnnnnnnnnnnnnnnnnnnnnnnnnnnnnnnnnnnnnnnnnnnnnnnnnnnnnnnnnnnnnnnnnnnnnnnnnnnnnnnnnnnnnnnnnnnnnnnnnnnnnnnnnnnnnnnnnnnnnnnnnnnnnnnnnnnnnnnnnnnnnnnnnnnnnnnnnnnnnnnnnnnnnnnnnnnnnnnnnnnnnnnnnnnnnnnnnnnnnnnnnnnnnnnnnnnnnnnnnnnnnnnnnnnnnnnnnnnnnnnnnnnnnnnnnnnnnnnnnnnnnnnnnnnnnnnnnnnnnnnnnnnnnnnnnnnnnnnnnnnnnnnnnnnnnnnnnnnnnnnnnnnnnnnnnnnnnnnnnnnnnnnnnnnnnnnnnnnnnnnnnnnnnnnnnnnnnnnnnnnnnnnnnnnnnnnnnnnnnnnnnnnnnnnnnnnnnnnnnnnnnnnnnnnnnnnnnnnnnnnnnnnnnnnnnnnnnnnnnnnnnnnnnnnnnnnnnnnnnnnnnnnnnnnnnnnnnnnnnnnnnnnnnnnnnnnnnnnnnnnnnnnnnnnnnnnnnnnnnnnnnnnnnnnnnnnnnnnnnnnnnnnnnnnnnnnnnnnnnnnnnnnnnnnnnnnnnnnnnnnnnnnnnnnnnnnnnnnnnnnnnnnnnnnnnnnnnnnnnnnnnnnnnnnnnnnnnnnnnnnnnnnnnnnnnnnnnnnnnnnnnnnnnnnnnnnnnnnnnnnnnnnnnnnnnnnnnnnnnnnnnnnnnnnnnnnnnnnnnnnnnnnnnnnnnnnnnnnnnnnnnnnnnnnnnnnnnnnnnnnnnnnnnnnnnnnnnnnnnnnnnnnnnnnnnnnnnnnnnnnnnnnnnnnnnnnnnnnnnnnnnnnnnnnnnnnnnnnnnnnnnnnnnnnnnnnnnnnnnnnnnnnnnnnnnnnnnnnnnnnnnnnnnnnnnnnnnnnnnnnnnnnnnnnnnnnnnnnnnnnnnnnnnnnnnnnnnnnnnnnnnnnnnnnnnnnnnnnnnnnnnnnnnnnnnnnnnnnnnnnnnnnnnnnnnnnnnnnnnnnnnnnnnnnnnnnnnnnnnnnnnnnnnnnnnnnnnnnnnnnnnnnnnnnnnnnnnnnnnnnnnnnnnnnnnnnnnnnnnnnnnnnnnnnnnnnnnnnnnnnnnnnnnnnnnnnnnnnnnnnnnnnnnnnnnnnnnnnnnnnnnnnnnnnnnnnnnnnnnnnnnnnnnnnnnnnnnnnnnnnnnnnnnnnnnnnnnnnnnnnnnnnnnnnnnnnnnnnnnnnnnnnnnnnnnnnnnnnnnnnnnnnnnnnnnnnnnnnnnnnnnnnnnnnnnnnnnnnnnnnnnnnnnnnnnnnnnnnnnnnnnnnnnnnnnnnnnnnnnnnnnnnnnnnnnnnnnnnnnnnnnnnnnnnnnnnnnnnnnnnnnnnnnnnnnnnnnnnnnnnnnnnnnnnnnnnnnnnnnnnnnnnnnnnnnnnnnnnnnnnnnnnnnnnnnnnnnnnnnnnnnnnnnnnnnnnnnnnnnnnnnnnnnnnnnnnnnnnnnnnnnnnnnnnnnnnnnnnnnnnnnnnnnnnnnnnnnnnnnnnnnnnnnnnnnnnnnnnnnnnnnnnnnnnnnnnnnnnnnnnnnnnnnnnnnnnnnnnnnnnnnnnnnnnnnnnnnnnnnnnnnnnnnnnnnnnnnnnnnnnnnnnnnnnnnnnnnnnnnnnnnnnnnnnnnnnnnnnnnnnnnnnnnnnnnnnnnnnnnnnnnnnnnnnnnnnnnnnnnnnnnnnnnnnnnnnnnnnnnnnnnnnnnnnnnnnnnnnnnnnnnnnnnnnnnnnnnnnnnnnnnnnnnnnnnnnnnnnnnnnnnnnnnnnnnnnnnnnnnnnnnnnnnnnnnnnnnnnnnnnnnnnnnnnnnnnnnnnnnnnnnnnnnnnnnnnnnnnnnnnnnnnnnnnnnnnnnnnnnnnnnnnnnnnnnnnnnnnnnnnnnnnnnnnnnnnnnnnnnnnnnnnnnnnnnnnnnnnnnnnnnnnnnnnnnnnnnnnnnnnnnnnnnnnnnnnnnnnnnnnnnnnnnnnnnnnnnnnnnnnnnnnnnnnnnnnnnnnnnnnnnnnnnnnnnnnnnnnnnnnnnnnnnnnnnnnnnnnnnnnnnnnnnnnnnnnnnnnnnnnnnnnnnnnnnnnnnnnnnnnnnnnnnnnnnnnnnnnnnnnnnnnnnnnnnnnnnnnnnnnnnnnnnnnnnnnnnnnnnnnnnnnnnnnnnnnnnnnnnnnnnnnnnnnnnnnnnnnnnnnnnnnnnnnnnnnnnnnnnnnnnnnnnnnnnnnnnnnnnnnnnnnnnnnnnnnnnnnnnnnnnnnnnnnnnnnnnnnnnnnnnnnnnnnnnnnnnnnnnnnnnnnnnnnnnnnnnnnnnnnnnnnnnnnnnnnnnnnnnnnnnnnnnnnnnnnnnnnnnnnnnnnnnnnnnnnnnnnnnnnnnnnnnnnnnnnnnnnnnnnnnnnnnnnnnnnnnnnnnnnnnnnnnnnnnnnnnnnnnnnnnnnnnnnnnnnnnnnnnnnnnnnnnnnnnnnnnnnnnnnnnnnnnnnnnnnnnnnnnnnnnnnnnnnnnnnnnnnnnnnnnnnnnnnnnnnnnnnnnnnnnnnnnnnnnnnnnnnnnnnnnnnnnnnnnnnnnnnnnnnnnnnnnnnnnnnnnnnnnnnnnnnnnnnnnnaactaaatcaaaccactctccaataatccttgggtcttcacatttcgcgcgctcgtaattataacgtcttgagaatcgggatgcaagggtagggtgccgtttaacaaaatgtgtaacccaattttggccaactgaaataaccggggtggttccgcgttgtttaagaagaagatccgccatttctcgtaccatagagggccggggggccgatccacgagaatccatagagattatccattttcgaagagattcctcttcaattgcggtcaatttagtcaagttggcgcgagaagtcgcgcggtgttgtataccactgaggcggtcccgaagggttgaacgcggtacgttaaaagtgcgggcggtagtagaaatattggaaaattcttgattcttaaaagcctggatagctaataagatcctaccctctttctctattgaatctttagaggattgagagcgttttggtggcatggtgggtggttgaattaactaggtgctaattcatggacgcgtttttggatggggtggcgggtcgtatgtggtggcggctcgtatgtgaattacgttatgttgtagttagttagttagttagaaaatggtgctaattaaggcattcaggcatcactaagcccccaaagcgggttttgaacgctggcccttcgtaggctgtcggtaaatgcatctttgatgaaagtcagcctcgctataaataaagtaggagattataggttgtaccggtaggggctgtgggcttggcgtgaggctgagcggagattgctgcctgcagggctgatagatttcagcttcctataaatatttatcaactgcaagatatcctcaaagtcctcacaacccaagtcttcacaaaccatcatgcctcccctaaaaatcatagtcacgggcaaatcatccgtcacccatgccccagaacttgccaccctcagattctcagtaaagggaaatggctccgagcaagacaaagtcgccaaggaagtgtcaagtttatcgagcaacctacaaacctggatcaaatcagcctttccctcctctgccgacaatgagcccgatgcccctatgacaaaattctcatccacgaacatcagaacctggacaaagtcaacaggtagacacgaccagcccttgccaaatccataccatgccagtatatccttcaaagccgtcttccgggacttcgcagagttgaaccacgcgatcgaagaattgctggtttatcctaaggtggagatcgacagcctggattggagtctcaccgacgaaaccggcagacgactggcttcggatgcacgcaaattggcactgcgcgatgctatccagcaagctgatgattactcggaagtgctcggacgctctgtttccgtggtggaaatttccgaccaacaagcgagtccctacaggactagacacctttttggtgcttgcaatagtactactccctttggggatgactctccggcgctggacctcacgcctcaggatattgatgtcgaaagccaggttaatgtcacttttgaagctgcgtgagatgtttggcgttgttctttcttcggcccaaccagtggactgtggatattggttgcactagactacatgtttgatttatcaagatcttgaatatgtgatatattcgtattatatgttccaatcctttttgagcctcggttagcattaaagaaagccccgctgaagtccataaagccccgggaatggaatcatgcaaccaacttatagaatcaatgtacgtgtcgtaatcatccacaaagaagttcagcggcagtgtttcaactctagaaccagcacgaagtgtagaaggcagctctagcctctgtgttcttcctatgctggaagtcgattaattcttgccttgcctgagggggctcctaagcttcgaatcgtttttgaacagtcgccctaaaggagaggcaattcttagagtttgaatacgatgtagatatggagaaacagcgtgtcagattcttcagggtcagagtggacggaggggagaaggaggagaggagaggaagagagctactaagtagacaatgtgttccccgcttggtgccttagtcaacagacacccgacagctgactaattagttataatgggggaaagaaaacctgttgcattcactagctaagagagggagagaaaggaagtccaggtggggaagcaagatactatctatatgaggcaaacaacggtctcaacaagttaactttgtgatgaaaccgtatagagatatgctcaagaaacatgtataaggctaggtatgcagctaaattaggaaagagatgtcagcacgttgatgtgcgcttaaatgacggatttcaatagtacttactcgttcggctatacacttgggttgcccccagttgtccaaacgcacttcgccgcctcggtgttgactttcaacgacagtaggtctgggcgggaatagtggccaaccgtatcaatcattgccttggcgtagtcaatatctccgaggttgatatcagcttgcaggatgcattcctccccagcggggggtgcctccacgagagaggctccgtccggtccgaatatcatagagaaccctccactaggctgctcacagaaatcagtaactatcaccacggatggaaagaaaagaagaaaaaaacaaaaataacacagatgagaaaaatgagaattaccgtttggataatccctccttcaaccaggttctgcttttggagactctctctcttgactacctgcgtacaaaccagcacaaaggcctggccctcaatggcgaagaattgactggcattgcgactcgccacgtccgtttcatggaaaggccatttcaaccccttgggctccgggaactccgccggccagctagcgacgtgaatctgcaccccctgcgagtactcgtagaaccgtaggagcggctggaggtgttcccagcagttcaggcctccaatgcgaccaaagggggaatcgaccaccgtttggagagactccgcctggccctcgccccagatagaccgctccacatgggtgggcttgatcttacgccgatggtgcacaatctggccgccggggttgatgaacgactgcgccatgtataagctccccccgtcgcgttcgctgtagccgagcacgatgaatatacccgcttccttgacggcctgacgaatagtatccatttcgggggaatcacggtttagtgaattggccatgtactggtgcataagctccatgttgtccacaacgctgcccgtccacattgtcctatcgagcatggggcgactaggtcagttaatgacctctagtgtgcgcttgcggtggcatcattcccttaccacagatagcccggaatccacacctcggggaaacccaggacattgatgcccttcgcaccagcttcctggattaatgcaacgctctttgcgataccggcggccaggtccagccaggcgggctcggcctggacagcccccacacggactcgagtcatcttgtatgtgttaggtttctaatttggtaagtttactaggatccgacgtggtgaaaaaaaaaacaaaaaaaagagtaatatggtggtatcgatcaggtcgaaccacaagtgcactcgttctatttattatatgagacacatgctttggttatctcctcgatcaatgtctcgcataggcatgcctgtttgagaaagccactccttttttcctttgtatgtaccctgccatgccagctcgggcgaggattcacgctaatgcacatgcacctcctagcctatttggaggtgctgataataccaataccacataatgtacaaatatttactgagtactccgtacagatatattatctttggcgtatgtgcattagcgttctttttcggccggcctggcatggcagggtagcagatttcctcccccacttgttggctttccctgtctatcggcttaccagcgtatgttgtaggtatgagaggccgcggcctccgagctataatccgtccttttgtgggccccagcaccacgagacccatgctagacgaatatagtgcgttacggcaccgtactttcgagattctcctggcgagacgctgagtgagagtagtaatttactaagtccttaactcgacagtaaatctgattccgaatgttaccgtactacatacatatgtatctaactctcctcttcactgatcttgatcgagtattcgttctgtccattttttctatacaccattccttctaaatttcccccgaaagaaccgcaatgacaaccatccaccaggtccccaatgaagctggtgcaaacctcaacatggcgcacttggtgacagtcgacttagcacgcattgtgaccggtgactctcaggagaggcagaaactctacgatgctgctacacgtcctggagcgttttttttggacttcaagcagagcagtgaagctatactcgacgcctcgcagcagttgtatgcgctatcggaccgttattttcaacgtcccctcacagaaaaattgaaggatttccgtgaggatcaacctgcttccagcgaccgtgggtaagaaacactcttctaactcgttgttggcatcagctgaaccgactctatcaaagttacaagagcagtgattgtgatgagacattcgaggtacttatcagccctatccgttgcgggtggcagagactctgctaactatcttcacaagtttgccgatgacgagctcttccgtggtgacctaagactcccgtctattctgcaggatgaaagcgatcgagtccggcaattcaacaagctctgccatgccgccgccatgagtatactttcatcactctctgattccttgggtctggagggcgacggacggtttgaagcgtaccatcagactacagacagcagcgataccggcctcaagctcatatacgagccctcaattgacaaggccactgacgtggtcgagaataagcacaccgatagcgggagcttgaccctcctgttctacgagcagctgggattgcatgtctaccttcccgagcaggaccgatgggactttgcagcggtccctaagcccgggtgcgccctcgtcaccgtggccgactccctgcgacgcttatcagacttgaaattccactcgccgctgcatcgtgtcacgcagcccagggacggggctgtgaagcggtattttctatcatactttcttcgcccttcccacaccgccaaggccgcatagggccaagggccaccgagttgttaaccgatttggcccagcagctcggcaccaggttgaacagatagttttgtaggacttagcaacaattatcgttacttttgccaacctatgacctatgggttacatccctgtagatacatatatgctctacgtactccgtagtatttatagtctgtcatgtgaatttattataaacacactggtgcttctccatgctaataagctgaccggagttacaggggctgacagagcccgcccgcttggctgcgatccgaacacccgcacggtgcgaatacgcgactggtgcctttattaatcccgtcagacagtgggcatatctcgtcactgaggggagctgtccttagctgaccgtcctggatggttggtgttgttgtgtcgttctcgtcttgcctgcatggccaggctgcccatcgtgccnnnnnnnnnnnnnnnnnnnnnnnnnnnnnnnnnnnnnnnnnnnnnnnnnnnnnnnnnnnnnnnnnnnnnnnnnnnnnnnnnnnnnnnnnnnnnnnnnnnnnnnnnnnnnnnnnnnnnnnnnnnnnnnnnnnnnnnnnnnnnnnnnnnnnnnnnnnnnnnnnnnnnnnnnnnnnnnnnnnnnnnnnnnnnnnnnnnnnnnnnnnnnnnnnnnnnnnnnnnnnnnnnnnnnnnnnnnnnnnnnnnnnnnnnnnnnnnnnnnnnnnntccccatacttgctagctgacccctccctggatggttggtgttgttgtgtcgttctcgtcttgcctgcatggccaggctgcccatcgtgcatttccctcttcagtatcaatataggctgtggaattttatttaattattatataattagtaggtggagagatcaaagttcaaacaatgtgctacttatgagaatttcaagtgcttgtttgaggcctggctgaagctctactctcaacaatcaccggacgcttggttatagatgctcaagactcctaccgtcaaatcgcgcctaccttttccttgcccctgaagaacagcagagctacagtgcatgcggcaacggcaagcgagaaattgaaccattggctggcgtgaagtccctggagtaaggcagataaatcaccctcaactcccctgtggcttatggccctcctttctaccgatatttgcaccacggttgcaatcgtgattccaacggccctgcccacctgcaacacagcagtaatcagcgccgcgccgagggcctgatcttctagaggtaagcactgcaatgtgaaaagattgagtgtcggatggacaatgtcggctcctaatgtagacaacaacatggctgggaagctgtaagcccagtaggtagtcgacggtggtatgggaacggccataaggaggcatgaaatgcccacgcagctgcagctgaaaactaggaggtagtaacccgggacacgggagaggagtttggcggcaatgatattccccacaaatcccatgattcctgtcggtatgaaccgaatagctgtgtctagtggtccgagtcccatatagtcttggtagctaggtaagacatagctgtcagctcttatccatctccagtccctcgaggaagccatgatagggaggtatgacacttacaagtacgtcgcgtagacgaggtagttattgaaagccgcaaacagtgtggccatgatgacctgtgcggcattgaaacggctgttgcggaagatagaaatcctcaagagaggcggcctctccgttttcctgtcaaggtaccatatccacaaggcgaacaagagtaacaaaacgaaggaaagcaggagcgataacagaacccaggacttcgtccatccgacaacgttgccttctgttagagcaaggttaaggagtattatggctccagtcaccaatgtgccgcctacccaatcaacattgaccagaaggtcggagaaagaggaagcctcaacctttgagtgtgggatcaatatttgaccggccacagtgacaattccacagaggatggcggatacccagaatatccatttccagctgacgtactgcgcgatcacaccactaaatatattgcctagcaccgatccgcaggaagacccggccgagtagatagcaaatgcgtagttcttatacttaccgggctggaaagtagcaccgaggatcccgatcgcagtcggaacgttggcagctgcacccagaccttgcaggcctcggaataggtccatgacaatttcgttcggtgcgaacggaaccaggatggtaacgatggtgagccaagcggacccgatgaggaagacggagcgacgtccaaagatgtctgcaaatctaccaaaaaggagcagaaagcagccaaaggaaaggtaataggccgagataatccactgttggcgctcagcaggtatacctaggtctcggccgatactgggaaggatgataactgttgactggacggcgagtgtctgctatatcgtcagcaaaaatgcatgtgatttcggacctagcacctgacttgcattgagaaaggctgctccagccaaggtaagaataagcgggagatgaagcttctgccctgcttccagctcttggaacgattcgatctctggctcgggcttctcgttggaagtattgaaagtaccggcgctaatggcaagcggtttgttgtcggccgacgactccatgatgaaggtggcaccgtgcatgttatcaatactggcaggctgaggctgcgcgccagcgttcccagtggtcttcttcatcgtggcagggaaccccaatagccgtgcgaaagttgaattgccaaggtttgagggcaaaaatgggatacagggtttccctgtataggggaactaaacaagtgaggagattgtaacagagtagactcgggaggcgcaggttcattaggcagtgtgcaggatctatgtgattttcttcttcttctccctgtattttatttcatgctagattggagcataggcacattcaaaatatactatttagtagctaaagatggtaatatgatactagctgcattagcggattttattactgtaggaacaatacccatcttacagggaacttggccgagcaatatggacatgtcacatgcctaatcaggaaccctcggggagatgactgagcagagaccgaataagcgcggcctccggccccgctctgccaatcgttattctatgtattgatatccgagcaccattacgtaggtaccttgcaaacctacactaatcagtcaaaccccatttaaatcatataattgtctgagagaaaacggggttccaaagtggtgagggccttggcattttgggctgtgtaacgtgccatttttgcactatatggttattttattttagggaccagcataatcccgaaaataaagcgaaccaatagacttatattagtcacgtggacggtaggccctaaagcccacttttgaaagggaagtttgtggacccgggggcactatacctaattaggcagccttggcactctttatcgaaaagaaatatggggagccctttttcgaaagtgatcggggtttacggggtttgactgtacaaaatactatagaggatctgcggtgccccgatggactcttaattgcgccgcaaagcccggaaatacagagccattacaatactgttttttttttctctccagtccaatcggtaatttgactaatattgtcttgcgcgagacacccatactagtatgtatgttgtataggtcccgactcaatggtttctcggcatttgtatgggctggcaccaaataaaaccagaaatgctagtaacttatcgaggatcgaccggccactcttcctctgttccgtttacttcatgctcccccttggtatttgctcttttctcactcgaagctattccaccatcttccccagcgttcaaaatccctcgcaccatgggatctgtcgatttccaagaagatgtccaggagtctcccccaaaaacacctttgatcggagatgctccagacggggggcttacggcatggttgcaagtcctgtgtggccatctgattgttttcaatgtctggggttacatcacttcctatggcatctttcagtcctactatatcacctctctgaatcgcaatgcctcggatatttcctgggtcggctcgctacagatcttcttcgtctacttccttggaaccttctccggccgagccatggatgcgggctatctccgcatcaccctgggcgcaggcctgttcctacagttgctgggcgtctttatgacctcgctggccactagctattggcagctactgctctctcagggtatctgtcagggcatcggggacggactgctattctgccctatcgtcgctttgatgtccacctatttcacgcggaagcgcaccatagccatctctatctccgcatgtggtggggccaccggcggcctggtattccccgctatcgcgcagaccctcctgcaccgcatcggcttcgcctggactatacgtgtcatgggctttgtgctcctgttcaatgcagtggttatcctggcctgtgtgcggcagcggctgcctccgcgaaagttgggccctttgatcgagttcaaagcgttcaccgatctttcctacactttcttcgcgttggggacgtttttttgcttttgggccgtctactatgcctattattatgttagttcacccccatctagtgtttccttcctgtcacttttgtggttcatcgtaactgaccaatatgtccaggtccgctcgttcagccgagatatcataggcgtctctgattacacctccttctccatcctgatgatcatgaacgggctaggcttgcccggccgtctaatcccagcgtacctttcggaccggtactgcggccccgtcaacacatttattccagtcagcgccacagcggccatcctactatactgctgggctgctattgaatcttacgggggtctcacagccttcgttgtgatttacggcttcttcggtggcggcgtgcagagtctcttcccatcggcgctagcgagcttgacggacgaaccgagcaaggccggagtccgtatcgggatgatcttctctattgttagtgtcgcctctttgaccgggcctccgatcgcaggagccctcatcgatctccacgggggtcagtatctatttgcgcagctcttcgggggaacctccatgatgataggttgtctcctgcttattatggcgcgatactctaagtgtggcatgaatttataccagcggatgtagcgagatgaaaaagagcaaagaaagctcaattgaggggattccgacaggcagcaggggaacagccacgacattatcacggagttcaatgtgggcctaactccaattttgtaatatgatagaagagacaggtactattgatttatggcgattttggttaaaaatgtcacaatctgcgttgtcgtatgtctgcatacgccataggccatattatacacctctagttctcgcccaacatagtcgcacatactccttacgatgttttccggcgctttcaaggcacattccactgaggcgatccgcaggttcctcttgcagagtgcaagaggcacaatttcatcggatttcagaagttgaataggaaaaggctgccaccgagccccgagcatcgtcaggcctcccttgcgcatgaggctccggcattcaataccactcacatgtcttttgaggatggcttgtctctaacgcggtagactagtaatggtggtgcatatcttggaaaaaaaaatatagaatagcgaagaactccttgcgagaaagttatattatgtgaggcgaagcttttccactgcatacagacatgcttcttagactttctatccgaggttctttcacattttgcgataagtattttggaaacctaaagtctcattcgtctatcctcatctcctatcatctattatcacttgtatctcccagattaatctcaacctcctttaatacattgttgttcatcgccctacgaattttgtaacctgcttcaactccaagtggtcatctccatttttagtctctcactcacgcaataaataaccgggcccttgtcgtccttctaccaagtttatcacttaatcaatttgatagctcgacacaatcccgccacggcctttgtgcccaactcttggccccgttgatattcatcatatctttgctctgtaagcttctcgtcctctgcgcaaagcttgaaagccagtcgctcagtccagatgatgcttctcaagtactcctgatccatcagcggcaggagcttagaccttaggacggctccatgcagcgctgaaaatgccgaagcgagtcctaacagcaaagatctattcttgatcggccgcatggagaggtgtaacaaggccacagagaactcacaaggccacaagtcgagcacctgctgaagcgatattggctgtggcagtccggcgtgtttcaccatgtgtagacctatctcgataaggcccacctttgctatccttctggcctcgtccatgccggccacgccagcgtcaacggaagtaaagccgttgtatgctttgaggacacggatgacggccgatatcgtctggttcgctgttcttgaaggcactgtcaccaatccttccaggacacactggtgtgtgaaccaaaacggaagaagtttgggaaggatagtcctggcgtcaggatttgatatcttcaagtcgtagtcagccgcatggatgaagtcgagaccttctaagcttcccgggacaaacagggggtagtgtatgcgaatatcccccctagtaggaggcggaagcgggggaaggtcgtcgaagagcctgaggtaagcctgtgggctcgggttgcacaggttgtcaatccacctcctgacaagatcgacttcggcagaggtgaaggacccaaacatcttgccgccccaagacagctctcgtatcaaacggctattggcactatcgcccggacgtacccatggttttgtcctagctagagccgcgacgaacctctcttggctctgaatcgaagagaaattctcggggatcagccactggccgagtgtctggccatcaagcttgataaggctgggacagtgaatattcccggccgcctgtgccttggctttaaacacttcagcgagcccattgttccactcgttgctagaggttgttggagagacaaattcagggcaagaaagcgcgcttgaaaggcaatagccggcttggactctcctccaggccctttctgccaccccggctccctctgttagttcgacgtgtgcgaggaatttcgcgacgctgttcatcgccatggcagtgtgtcctgaatgggagttatcgatgctgatgtgaaggaaaaagtaatatccactaatacccagctcctcaagctctttggccgccatcatggtctctagcgtaaggagctcgaagtgcatattatatccgagaatctcaggaagaaaatcgtgagggaagagggagatgagaagttgtgaaacggcggctttccatgctaggttattgaccatgccatgccgagggtggatgaaatcggccgagtctggttggggaagggaaattccagcctcccgaaggagctgactgtacaggtggacatggtgcatttccaggttcccatccccgtactcctctgacaagacctgccaagcgtctctagtcacatgtcgtttcccatacggcgtgctgacgcggtggatatgaccaacccaagctccatcgacgagcttaagtggtgccctctgctttatccagtcatgagattcatctcgggtctggaatagctcccgcattcctcccaacttccttctggaaatgtattgctcccattgtacagcgacttgctcatcctgcttcttaataaaggcttgtatggaggctgggctacagcttttcagggacatgattgaatcagctctttttcgctcccaggataccccctcggccaacaaagaaagcaacgtgtcccttgccagtgggaggaattccggataatcctccagattatgaagcttgaagtacattctcatatacagcagtcgcctgtattctgaagaattaaccgaagcggctgatgctaacaatttccttaacaattattcacatccatatgcagtataggggtgtgtggcaagtaacataccaggcaacttcaaatctttagctgaccccaccgacttagcaggttgtcgccgtgctgaaaaacctagaatccagaaagtggcaccacagaggcccaaggcgacaaagataaggtacggaaacatctccgtagaccgagtaaccttgagaggagcaatttcaagttcaaatttccaaacgtgaatgtccgtatttgggtctgtgattctaagaatacacgaatttcgaaattgataggctggtgatataggaaggagaggtccttaatattgtgagctgaaaggacgtggagggcaaagacgggatatcctatacagggaagaactaaaagagtagagcttggaggcgtaggcttatataggatccatttagtcttcttctttccgccgtctttctttcccactagattacagcatagcatcagtaagcacacttaaaatacccatggtgtaggtgtcctgaagtcgcctgcttgctctcctgggattaaaagaaatgactaaaagatagagaaatccaaccatgtctttttaccatatgtaaccaatgaatgtagtccaaggttacctaataatacgtaccgatgtttttttttttgtattatgttgtaaagcctcttacagggaataaaacaaatgattgatgtaacgtatcttgtactgtggtcgagtgaggttaaaaacgaagtctaggcctcgatatgccttttacatattgttgccatatactaccaagggtactttatttagagatttcccttttgggagggaacttttggaggcagagtgtagagtacgccgcaggtgggggcgattgcggcgacggcgctaatacagttcctccgcaaagtttccgtacgaatatatatctccgtacggagacttttgcggaggaactgtagatccctgtggaggttggtgaatctaaagttggaaggagtagttacagggcacgtgcgagggcacggatatcataagtccaccgggcctccgccggcggctcggcccagccccgctcggtcccactcgccctcgcccagcacctcatagtaccatttcacgaaagcagggtgatttcggccgaaatgccgtgactcattctcgacagcatcgccatgtcaactgcttcttacctatatataaaaatttcacccctctcgttgtggcgtacctccgtgcgacctactcgaaagcagtctgaacagtgggtttgctgttttctttcacccatctacaacaacgccctgattacagacctccaaggttgttcaccccagtatggaaggatcctaccccctgcaggcacgcaacacggtacgccgccaccgcgaacgagccaagtacgacttcgagacggttcattccattgtgaacgcgtcacccatcctccacgtgtcctttctgcctacggacccgagtgatgacccctttccaaccatccttcccatgattgggtatatgggctcatttgatggcccatcgactggggctctcgatgtatatcttcatggccatagtgcctcacgtgtcatgcgcttagccggcaaccacggaccggagggaatcccagtctgcatcgcaacaaccctgctcgatggtatcaagctctcgttgacgccctttaacaacagctgtaactaccgcagtgttgtgctgcacggctatgcctcggttgttacggctgaagcagagaaagaatgggctcttcacctcatcacggacggcctggtgccggggtgttgggacaattcccgcgtgcctcctacgcgtgccgagaacctgagtacatctgttctcagagttcacatcgccagcgctagcgccaaaatcaaccagggtgggccttctgatgacaggaaagaccttcaaaacgacgaggttactggtagagtgtggacggggacacttccactctgggagtctgttgggacacccattccaagcattacaaacaaagtgaccgaggttccggggtacgtggttcaatggcgacagaatcaaaatgcgcagaacgagtcatacgctcgggaagccattgagaagggtaaatagtgataaagctagtacagagtcttctctaaacattacaatgtgatcagttcccatcaggataggccaatttatccaactcctgccattcttcgctctctgcatacgtggctcggataggagccagcagaacgttgaacgcatccgccacggccctcttcaaagattctggttgcagctggcctgctacgaatgctgcttcaatggcctcatacgaggtgaaatcctgcccctctccatgctcagcgtaggtggtaaaaacagtgtcaatcggcgaccctagtctgcagaaagggcgctggtccagctcggaaccggtgctctcgtgtaagttcaggcctgtcttccctagtaatctttccatgcgctgctcactgatgggaattagaatatctcgaagcagccctaggactccatttcccgtgacttgtcgttcggggcacgctgcgccgaatatcttgccacggactgtttcggggtcgtccagaaactcaatcttcgtctccgccgacttggaagaggacatcttcaaaccatcaagccctgctaccatggcattcatcagatgctcccggcggcggtacccgagcatagggatgaacttcttggcgtgctcaaagaggcccgtctgatccccagaaccgttagcaggaatttaagtgagtagttttcatcctacgaacctgatcctcgccgccatactgtatgtccagatccaggtacggctctgagagtgactggtagatggagcagagcaggggacttatttgttctgtctctgccacttcagctgaggtgtcccgcgcatctttttgcgtcatgatggcgcagagcttctggacatcaatcacaaagtccttttcataggcaaggctggactcggccacgaagttcacttgagacggtgatacgccaagtgccttcaggatagcggtgaccaggaagtggtaatactgttgtcgatatgccacagtctccatggaatggatgtagttaacaagaaacccgtagacgtcaagatagtacacagtcacctaagcatgcgtcagtacgcaggtcggcttgggctatagatgggttatacggacatcaaggccagccctgaggaagtcaagcagcttcgcaattggcacgaagtatccaacatgagctatacgacaaaggttagtgccagcatcattctcctgtcagccaaaaggacacatacgcttgcctgtaggtgtggtttcccaggccaacttgagcttaggcttttcttccaggagcccttgcagagattctgcgtccgcaggttcgaggaaggattgcctcctagtaatgaggttcagcttctcctctgtagagagcatcttttgagacattgaaaaggtttggattttaaattctagtcctggaatggtaggaaatctgcttccttaaatactaatcgtcatttggggatgacatgaacggcactattcgagtcccttgcgaaactctgtggggacctttcgtatactatctatgatgggtgaatttttgctgtgggccagacactacgctatagcattggctgaatttcagtacctaacagggctttcggtacctgaccttttgctcgtagccgcagtagtgcccatcgctcctattttcggaagaagccatcgactcgccatgatagtaagcgggagccccataatgaccgtaggctacatcaactaatgccatactgtagtattaaccaagaacataagccacataataatgctgatttgcaaatactaccctggcaacacgggcaagcaacggacggacccgccaaatactgtagttctcccccgaggcgtgatcacatgccacctcagcttgcagatgccggtcttcttcgggatggtaggcggagaatccgactcgaagaggctcgggctagtagcttagcagatgcggaccaccttggcagattcagcctctcgtaagatatttaaggatgtgagattaattccgccggcctccgattttattccggagcactgtcccctacgtgaggtggggctcgtttactccgaaagatgcaggtataaactcatcgcaaggatggaggaagagcaagtacggttacatcgcgcatatccagggatatttccaatcgggtcttctcgagcatgtatgtagtccgtatttttgggttcaaacaatcgtcttgaagtggtatgtctaatttccacaaatattcactctcgtattctagttcaccggccagtatcaaggccaaatatttcctcaagtatatttttcctttgtctgggtgctagcgtatctatagatgtatcaatgttatttgaagggtaacttacctatgtaaataagcttgacgttttgcgttgtatcgatgtttctttgctaagtcgagctagacttttcaagagagtagtcacttacttattcgcatgatttctccatctttcttaagactctctgtccctcatcactacatcagtccctaaggctagacttagaaaagaacggtagcataccatggctcaatccctcccgcatctgcctaagggcatcccatcccctctggttatgtggaaagacatgactccctatcacgcacgactacaggcagcaagcctctcgtctcctcgggtcctcgtgattggaggaggtgtgacgggcttgataacttcatgggcgctgcttgacaaggggtaccatgtgacgatcctctctaaggagtgggcatcgtacggccacgagcaacggctgacctcgcagatcgccggcgcgctgtgggaatttcctccggccgtgtgtgggcagcacaccgacgccatctcgctggccaactctaagcgctggtgtatggtcgcctaccataactgggaccagatggccgccatccccgctatcgccgctgtttcgggtgtgtccatgaagccagccgactttttcttccccaatcctattgaggaggacccggcgcagttggccaagatggaggagatcatggctagcggcgttcgggggttcctccgctctatccgcctaatagagaagcgccacatcgatccgcaatacggcgccgtcgatggttatgagcacttggcaccgattatcgacaccgaccaatgcatggcttggctcatggatctggtccaggccaaaggtgccacgctcgtaacggagacactgcagggggacatcctcgaccatgaggaacggcttcgtcgacgctttcaagcagacgtgattttgaacgctacggggctagctggtgccgagctcgccggcgatacctcctgctatcctatccgcggcggactaattcgagtcatcaacgatggctcggacttccccaaggcggaggccgccctcaccatctccgctgatgccgcccactctgagcatgagatcgtcttcctggtgcctcgcaacgacaacatcctattgatcggcggcattgccgagtcccacgaatgggatctggatctgacactggactcgcccatcattaagcgcatgcgagcgcgctgcgagtccttcctccccggtctcaaggatgctcgcttggaccctgactacccattggcccagggactgcgacccttccgggcaaagaatgtgcgtgtggagcgtgaactgcgcaaactgggccgcaagcctagccgcattgtgcactcatatggccaaggcggtgcgggatggagtctctccttcggctgtgcatcggatgccctggcgttgattgaagaagccctgctggatctggaaccggttcctatggccattcttgatcagaaagattattcttgccccatggtatctcagaccattcaggccaacttatagtggatatctgcctctagattttagtcggcgcacgcgtatgagttgatagtagacatcattgccagggttcagggtccggatcctcgcccctcatagaccctcatttcatacaatttctacgctttacataaatcggttgaataaatacgccgattcatccaataagatactgttgtttacacctgttctagtactttggataatctatgttgttcatcttgaatatatctttctgtcctaagtaaatttgcgaaattgcgcgataaccaagggccttacgactccataaactcgatcacgttatttatcacctccagcacttttgtctgatactcacgtgaggctgccttgcccgctgaaatgatggcttgtgctgttgaaatagcacctgttctaactcagaggaagattaataattgggtcaggaattatttcagacgctgcggctttgttcctgatctgcaacagcctcatatcatctcgtattgacgcactaggcattccttcctcacctattcacatcatgaagtggtgcttgacatcaatatacttggacttccgttggaattatgagtttctggtaagcttcaaggcagaactgtcaacgtagagaggaactgcattgatatgaatcccggggatgcagaggtcattgataaagtttcgaatcaatacagcttccttcgcagcctccacacatgcaatatgtctccgcatctatggaaacgactgattctaacttctaatgctacgtaaagtgtgactgtagaagctctggggaagataatgatggttcattctctagtctattttttctgctggttgggtttttctgccaaagttagccgttgacttttcaccgcattctttctcatgattttggagcccgtaggataaaaccccctggtcacgtgacatacacacacacgaggttatgatgtaattgcttcgctttgctccgcaattaatgaagcgagacgaagaatacagaaatgtacttagacggcgtcatggtaatatcataaatcatttaatggctattcaaattactatagggataccatagtaaatgatacaagctgatcaaaaactgcggccagcgggagacatacccgaagtagtttagcgcggagtgtgtcgcaagtaaaatgaatgtgtccatagacgttctctacccaaaaggggtcgaattagcgattatggggggtccctgtaacaatccccttctttattttattcccttgctcaagtcattcaatactgatgtaggcgcatacaagagagaagtgatcaaccagaaagcgatgatatgaagatggatggaagatggtgatctagctactgccatgaatctctctatatagctccatgctacaaagccaccagatcccatcctccagaaatcagaagaagcatctctgcaggtatacaaagagaattccaacacggaaagctgaacagcaagtcatgtcatctgcgagtgaagtgaaagaaagggaaaggctttatcgaggtcaccagttaccaagcattcagtaacttcagctatcagagctaaccatgcagtcgtcgatgtcaggccaagcgccaagtcaggctttccagtcgaacaagcggcgaagactcgtccctacgattgatcctgatatgatcgagccacttaaccgcttttcggatatgctcgctgatatgaacagcgatgatcctgtcattcgatcccgtgcggctgcgcagcttacagtattatctcctttaatgcaacaactcgcctttgcaaagaacgccgccggcgtccattatgctgcaagggatttcaaaacccttggagtggcctgtatattctggagatcacacaaggaatgcgtcaaatacagtgtgcatcacacacgcataatggaacgaagtatcccggtaccttcaaaatgcaatcaattatatttttactcaaacagaagagcaaattaagtccgatctaaagtgtgtcgatgagatccgcaaatcattggccacaactgccagcaatctctctactttgtccactcgcaaacgccgccgtgaggaacccgaataatgatattcgcaagacaaagtcgttgccctctgagaagcttcacctggggtttctctagctcttctgcttattctccttcttccatctcttatttcaaagcttcgtttatttagtattctcctgagactcaaactgtcatttttagtctacgcagtaccctagggtcgagatctatatcgcttaaagagagaccatatgtcttttatgtcagtgtgaccaagtggataggagtgaggatttatgtcataagacacagcagtgacaccatcctgattttcgctagctcgtgtcgtgcttcgtgaacatgggtttcatatatccacggttcagtcattacaatctgtggcatttgatgtctagctattgaagaggggtccctgtaacggggacaggggcaccgatagccctgcttgcaaaacaggtgtgagagcagagttgttactgagagggtgctagagaggagaatatgttgggtgaccggaaggcggtcacccatgtgggtccagatcactagatagttccgctccctcttcctctctctctctccctcttgtccatcagatcttagccgaatctacactagttgttttccccttttcaggtacaacgtagttagatcgccattacaatctcaggtatctttaatctgtttgatcactacattctcacttcaagatcattgatctctaaaaaataagaaagaaaattgctgaatctgatgcttaattaaggatatcccacccctccgatacctcactacactttcagcctggtactgactttgttgggctctgggtatgattcagatccagccagatcaaaccatgagaccagaaattagtcttcacggaagaggaagctgcagagggagatagagactaagctatgctcgtggaatgggaaactacaaattcggcaggcacgaacctattaagtcgagagtacatcgtgtttcccccgagcactcgatgtttttcctctcattaacattcttgttatagagtacattactgccacgatcacgatcaccactactttcttgcatatcgcctctgtggctccctcgcccacccctccctccgctatcgataacctagtgaggatcctaaatagaagctctcgattctcgaaacacgactgggggcttttcgtgcattagctgacatctcgcggcatagcatctaaaacctaaatccggcccccgcggccgaggatactactgctaagactgtggcccatgccggcgggacagccaggtaagttgtgattcatatgccccatcattgcccctattcactggtagtaaacgctaattttggaacatgttgaagccaataccaaccccgctggccccggcctaggcgggccctcgagcccctcgcttgtcggccggctcttcgacaaggggaaagaccgcttcgccagcaaatccagtggccagcgttgcccgcaccgctgcccatggtttgaaggaaggcggcaagcccctcccctaggcggcgtgaggggttgtggtgtcgacagcgttcctctgttgttttgtccgatttcttctctccgagaacctgagctaggtgagatgaatgaaaacggatgtaccatatatgtaaggcggggatggcattcctctggggccttttgaccgtttttgcttctgtactggcctcggtattccatgtccttattattttcacacccgcaatcccaaatattgatctagtggaagtctgacaaaccaggtatcaaggtagatacttgtctcaacactatatatcttcctgtttgcgagttgtccaccgtaatactagctctttcaatgtcatattttgatccttgacacgcccctaatagtgttcttcgccaacctcgaatgcggaatcgccattgtatgctccagggctgacaggttagattacaaagcacatctagttaactaacgactacccaccattagggttccttgctcttttatgtactttactttcttgacaagtagcaaacacgctacatgtggtgcccttgatggaaatggatcttgacagaagacgaactgaaatcctccgttcctacaacacaatggctaggtgatttccggattgggaaatatatccctttatcctcctcatccaatgattccacgcccttattcaagctccaagcaggagtcggctccttctcggatcggccgccaatgtttcgggccgatcttgagctctttcccgctgtcggcatctgtgccgagcaggcgccttctactccgatcgctttgactagtacgctttgagccgcaccccactgggatatgctgatcggggcgaatcggagcccctccatcattgaacagctcatgagcaaaccagctttgcctgacgattccaaagtccaatccgaggcgctaggtaccaataggcgaactaatcatgttacagttctgctacaagaggtcagtggattttgctgcttctgtcctaaaatcaaggtccaagagtgagagccacagagatccaggttgctccactgataagcccgaacctgatccgcccgaatatgatctgcgtcaagctccttgaattgcagttgacctgttgatagcagctgatgctacttttgtacttcgattttgtattgtagataatctaatgtaatattcgggacattgagattgacaatgacatatagaataaagattaacgcaagtacaagtgtcatattgccctaaatggccgtactgttcccgtcgttccggtcaacctaggtaaaaaagcccagcggtaaaaccagccccacatccccgcggagccccaacgccgccgataaccgacctcggctcaaagcgaccccgtgatttacatatgacctttatcttcctcccgaggttactctttttcccttccttttcttcctcatagcaccttgagcttattctacacttatatcacaatggcttctattattcgttctttgcgacctttgtcgcgtgcccctacagtccgcctggcgggcaagcgcctcgctgctggccggcccgtgcagaggtaccgttttgcccatgagcacaccaatgctattaaaaacaaattcgctaaccagtttacccccattatagcgcgtatgcattctccaccaccccccgccggcgggaggtcgacatctccgagctgaccccgacacccatcacccatttgtctgagacggagtctctgatggccgactcggtatcgaagttcgccgcggagcaaattggccccaaggtacgggacatggacgaagccgagcacatggatcccaaggtcgtcgagcagctcttcgagcagggcctgatgggcattgaggtgcccgaggagttcggtggcgctggcatgaacttcaccgctgctatcgtcgcgatcgaggagttggcacgcgtcgaccccagtgtcagtgtgctggtcgatgtccacaacacactcgtcaacaccgccatcttgacgcacggagatgcccagtctcaccgtacctggttgcccaagctgacttccggcactgttggttcgttctgtctttccgagcccgcgtctggttccgacgccttcgcgctccagaccaaggccgagaagaccgccgatggttataagatcaacggctctaagatgtggatcaccaactctatggaggctggtatcttcatcgtctttgccaacattgaccccagcaagggctaccgcggtatcactgctttcattgtcgagaaggatacccccggtttctccatcgccaagaaggagaagaagctcggaatccgcgctagcagcacctgtgtgctcaacttcgacgactgtgtcatccccaagagcaacctgctcggcaaggaaggacagggatacaagtacgccatcagcaccttgaacgagggccgtattggtatcgccgctcagatgaccggtctggccctcggtgcatgggagaacgccgtacggtaagctttcttgttcaatccacacccgcatatgaatccgataagctgaccaaaccaaagatacgtctggaacgaccgtcgccaattcggcgacctcatcggaaacttccagggtatgcagcaccagattgcgcaggcctacaccgagattgccgctgcccgcgctctcgtctacaacgccgcccgcaagaaggaggccggccaggacttcgtccaggacgccgctatggctaagctcttcgcttcccaggttgccggccgcgtgtccagctctgctgttgagtggatgggtggtatgggcttcgtccgtgagggcattgctgagaagatgtaccgtgacagcaagatcggcgctatctacgagggtaccagcaacatccagctccagaccattgccaagattctgcagaagaagtacaccaactagacgtgtgatgggggtgattacctacgccaaatggctttgtttgtatatagtttgattccatgcaggatgtggcgtattgattgtttttgggtatgtattcattgttccctttggggtatacacaaaacatgaagagccatcatgggtcatccctgtgaccatttcaaattcactccgagatatgaatgtcaaactgtgtacaagagtaaagagcagactgaggccatgcgaatgtgcccagccttgtttgtatatccaatcctagcaatcatcttctggcgtctgctgaccaccgctcatcgagtcgcatattgtagatggaccgtgctcgggcagcttacttcattcgacagggcgattatttctgttatcatttttgtcgttattatttatgcatgaaagacaattccaatcgcaatttccgcaacgactatgaagtattgctttgagatctatagcaatgatcagtatgcatcttcgtatcgaggttcttgaacgaaactcacatgacaggagaccagatcgcctgaactcgcaaggcattatgtttccaccgaatcaatgtccttgaacagccccggttgctggcacatgcgttattccacatgtgctattcacgatggaggcacccatggaaactcatatgtcggatccgtctgttgcgattgaggcattggttgcgggtacgctgatgtggagggttggtaggcttgggcggaagttggctgaggaacgggactggcactcgacatggaaagtgaccgatcgctgtaagtgaattcggagaaagaggattcggattgttgctggggtgggcagatgggttgtccttggtgaattcgactatctatgggatatggctccatacgattcgggaattcgggattggaggctgcgccgagcgacggcgaccttgtgggcggatatggttgctgccagtcatgccgaggagacgctcgacgcggtactaacaggcccgatggctgggtgtgggatgttgcagtgaagtgtggcggtggcaatgcccctgctggaatacccgatattgcactattcgggggttctcccaaagaccactcacttcgaaacgaagccatcggctcgttactggaggcaaactccggtcggccagtcaaagcagcaacttgatgcttcaatcggatgacttcattctccagaaaggcattgtgttgcacgacttcatcgaaccgctcggttcggagccgcatctcctcaatttgtgactcaagatgttctatatgctccttggtgcgttggcgaatggaccgttgagcctctcgatcgttggcacgctttcgctctagttgttccgcggacaatgtcgagactttccttgaccccgatcgagattcacgtctcctcgcaggtggttcatcttgagagctcatgattattggtttcctcgcacacccgagactcgatataaagctcccctccgttgcccagaacctttcaaagagaaccccccgctggcgaccatggacccagcactgcagcctaacatgaggggaagtggtggatcactggttttgaaagatggcgtgtgggtggctcgagactatttccgagcggagcagggatcaaggcagagcgtgacagatcgtgccaattcagggctagattggtttggacgactatacggtgtggggaggaaaataaagatgatgtgcgtggtatagccatggatcctttcaggacgtgattataaccttcccagcaaccgagtggctgaataagacctgaatattgttcccctcttcaacacggcacctcattttctccagattgcttaacaagccaggcaaatctccccgatgatgcggcgaaagcgagactctaagccgacccctaagcacccaataagcgtggagagatcgaactgtgtggatagctacggagtactccgtacgggtcatgaatatagtgttttctttccagccactacggtgagccgcccccatcgcgaggtccgcttttttcgactcctgctcccacttactcaagggtcttctgttggcgccaagccgtgcgccataatgatgggcatttatggggtgctccgtactccgtaccgtgtactccttttccgttctgtgtgctggctgagcgattcaagttgagtgttgttccgtcaagccggggcgcacagaaaaagtactaaaaagacggcttgcgccataaggcatccacagaccatcggtgatgatccgcgtctttgtggagatagcgtcttgtggagatatgtacggagtaaaaggcggacgagaatcctttggcccccgatggtccccgagaatgtccaggtatccacgggctccggggaattatttgcacggtataagcagactaatatctctagaagaagggcatctgatgttgtcagactgattgtttgaaaggcatttgtccgcaatagccgcaaggttttgacactcctattatcgtggtcttatgttcaccctaagaattttaacgggggattgcaattttattattcgagcaccaccgtgtccgctctgacgggaattgagaaaccggatgacctctgcattttgatgtttgatgcgtctaaggatcttattgaccatataggggattttacctattctggagacataattagactattccggagacatagttagaatcactcccccatagatgctgcgccttgctcactcgaaatctgccagagcataactcatgcttaccgacgtttaataattgactgaaacgtatacaagcgacaccgacatgtccagcatacgttgtacatgatcgccatgatgtggaggtatgtaagtggggaattgggcacggtcatgaaaatgctacacagtagaccttacgattttaagcggcgtgtatgcggacgtttgcactggtttaagacacggtccgtgacctccggtcgatcatatggatctgatgtcggcgttattcgccgtgagccctaaccgagtagccactcttgaatttacgatattggccaaccgtcccgaatatgttctagtcggtgagaataaaaacgcgcgcaaagtatttgattggatgaggaatgattcgtgttcatgacgggtggcaaggaaggtgactgccataaagtgaggaaaatgttataatttggctgagatgtccttagcgaagctgacaaccctgttagggacatcatcggagattgcttacaacaatagaatggcccaccagaagtacctacgtaggtgctactactatgtatcggtcttcgccccatattgggtgatcgactaggactattgggcgaatcatatcaataggatatggcctcgaagcatcttgcagggattccttgaaaatctgagttctgacatgctgctttgcgtttcttccagatcattctcctctgtaaatcgctgcatgttttcaacgtaaatgatcacactaacctacgccctagaacttctagaagtttcccccgccggttcaaagcctccggaaatatggccacgagaaggaattctcagcagggataactactaaaggtatagccataacatccatctaattttggccaagtatttggacccctgatatattttcgcatgaaaaaagactctgagcaggcgaattaccatatgcggttagtctgacttcccaggaactgtcccacaattcacgtgatatcaagcgaagatagtgggtcttatatggccaatcacatgacgcataccagactttaggacaatcttaaatgcttggcaacaaatctcttctttgtcaaatgtaaacttgtaatgattcacatcatcaagcatcagtctaaacttttgctaaactagaacaaactaggaagaaagattacactcactcacaccttctctttgtcttgttttgtcaacaaacattaacattcattcactcgccacttcgagtttgaattttcatcaaagcaattaactgcagtttcttgaagaaatataagcctcgaccatcatggaaggtcttcaactcaaagatactcagctgtactcaactatggctgggaagctggatgccaggctcctcaaagcccttgaggtgatgggcttcaccaatatgacccctgtccagcagcgtgttttgaacgagctgccaagttggcgcagtgactgtcttgtccaagccaaaaccggaactggaaaaacccttgctttcttgttgcctgcattgcactgcctgcttcaaggtgataccgcgccacccaaaggcaaagtcggcatcttgatcattaccccaacccgagaacttgcccaacaaattgccaaggcgtgtgatgaactaacctcgcaacttcccactcctcttgagtgccatgttgcagtcggtggaacagcccgagcatccgctcattcgcgcttcatgaagggcgcaccttccattcttgtcgccaccccgggacgcctgtgcgactacctttctcaaactcccaccgctaagaagctgtctaacatccagacattggtcttggatgaagccgacacgatgcttgagagtggctttatcgctgatgtgaagcgcatcctccaactgatcccacaaaagagcactgggtggcaaggcatgtgcttctcagccactgtcccacccaaagtcaaggatgtggtcaatattgtgttgaagagagactacaccagcatttccaccattgataagaacgaagcaccaacccatgagagagttccccagtactacgtgctgatgccgtctgtggcagataccttcactacacttgcctccctgctcaagcatgaaatcaagactagctcaaaaatcatcgtcttcggtgtgactgcacacatggttgctctcctcgcaggagtcttctgcaagggcatggttcatttgaaggtgttcgagatccactccagactcaaccagggtgctcgcacaagaaccaccaatcagttcaaggaagccgaatccggaatccttttcgcttcagatgttattggtcgtggtatggatttccccaacgtcgacttggtcatccaggtcggtttgccatcgaacggcgagcagtacgttcaccgcgtcggtcgtaccgcccgtgctggcgctgacggtcgcgctatcattctcctcacggagggcgagtcgttcttcatcaagaacaaccgccagttgcccatcaagccccatcccgactccgaagcgatcaatgccggcgctgcttcatgctccaaggctgtcctggaggccatgtacaccatcgacgaagagtcgaagcaacgtgcttactcgtctttcattggtttcttcgctgggtccggtcttctgaggcagcttcgtctcgacaaggccggccttgttcaactcgccaacgagatggctgtcaagggcatgggatgtcccgagcctcccccaatggacagaaaggtcattggcaagatgggcttgaagggcgttccgggtttcacatatgcagaccccaatgagatgggccgaggcggatcctctagacctcgcaactcttcccgaggtggcaagagtcgcgatgcactcagccctggagctggtcaaggagaccgaggcggtgttgagaagcgcggaggagggcgcggaggccgtggcgcacgtcgtggtggtggcggcggacgtggaaagccgagatcatgatcttttttgcatattgatgtcgagcacagcgtgctaaaatgttattatccatagacactagagactaacgacctgctacacaaaattccttaatcgaacccaaaattacttgcgaacagttgtcacatcttgatgtaaagtcgtaaaggccaaactggaagctagccacggtactcaccattgctttgagtccacaagattccgacttaattgacacagtgtcattattgatcttgacagttgttcttgggaatactaaaatggtcaggtgatcacaggtaaacacacatttagagcttcaacactctaccattccaacacgtcattctttaacttggaacatttcagggcgatcagctatctatattgataactgcccaatatggatccgagctacaaagctcgcaaggaggcctttgtgtctaatcttgcgggaagcacaatcctcgagatcaatgcagtgacactcgttgcttcagtgagaaacctcaagactttatctcgcaattgatacattctgacctgtgaccactctagacctctgtcctcctttggtccgcgctccagtctcgcctatccttcttcacgccctacggtcctgcggcgctcgcgaccgacttcatcctcaatgtactagccatcttattcgcaacgactgcatactcctccgcaccgcttctcctcaacatcttcctcatctcccccgcggtcctcctattcctcacccgaaacggcctgcgaacaccccaaaaagccaaaactccccgcaaacctaaggccaaaaatgagagcccccaggaggagcagcaggctttgcccattcacccattcttgaccacgtaccgtgcggccatgatggttgttacctgcatagctattctcgcagtcgacttccgcgcgtttccacgtcgttttgccaaggtagagaactggggaacatctttgatggacttgggtgtgggctcttttgtgttctcggctggagtagtctctgcgcgcgcggttttgaagggccggaactcgaaatcaccaaaattagctttgcataagagattgattgggtcggctcggcattccattcctctacttgtgctaggcctcatccgactgtggagtgtgaaaggattggactacgcggaacatgtgacggaatatggtgtacactggaactttttcttcacgcttggctttttgcctcctttcgtggagctattcgactccttgaccacattgattccctcgtatgaggtgcttgcacttggaattgcagtactctaccaagtcgctctggagtcgactgatctcaagagttacattctcgtgtctcctcggggaccagacctactctccaagaaccgagagggagtcttttctttcatcggatattttgcaatcttcctagctggacggggtgttggagtccgcatcattcctcgtggtacctcggccacaatatcgcctcagcaggcacggagctctgttttggtgcgcttggttctgcagggaatgttctggtctaccatgttcttcttcaattccacctacgcattcggctatggtgccaacatcccagtgtcgcgccggctggctaacatgccgtatgtgctttgggtgtcagcattcaacagtgcccagcttttcctgttctgtctgacagagactgtgtttttccccgcagtccaccgagccactagcaaggaaggcgaagcagagcagacatcctttgcgaccagtcgaattttacatgccttcaaccgcggtggccttgcattgttcctggttgcgaacctgctcactggagcagtgaacctgaccattccaacattggatctcaacgcgccgcaagccatgggcattctaattgtctatgcggcggtgttaactggtgctgctttggggatggacaagtacaatattaagttgagcttgtagatatattggaatacttatagatgtagtattatctaacttaaacattgcatatagatgttcatctgcagggatataaacctctgacgtaactcgagtttagccgcggcatgtgatattggtggagcaacatatgagcccgctccgagagtcacgcaaaccattctgcaactaacactatgcctgtcaatgaacaatcttttcttaattaccctccaacacttgagggtcctaatgtgccgtacaagtatgaagaccaggtcctaccggtcttccgtggcgtgcctctagccatcggcgctacattgtaagctacaggagagctccattgagtgatcgccacatactaattcaccgctgtttcttccagaattcataacatcgggtttatccaaagccatttctggcgcaatgccggcttcggcgtcattcgtgaaatcccccacttgggccagtacgccggccgctacgatccaactgtaattccagtcgacaataccacccaggccgaggcagaagcgaaagcggcatctgcagttgtggagcgcaggaagggagatcatggatactatacttctgcagactaccgtgcgctctacttgtcgggggagctgaccccgaccgctgtcgtcgagacgctattgcctctaatccggcgtgatattcagccgtccgggaaacactcggttgctttccttgagtctcaggtcgagttgattcgtgcagcagcggaagaatctacggagcgatacaagaagggcgagtcgttgggtccactcgacggcgtgccggtcgcagtgaaggatgaggtgcacctcacggggtataagcgcacgctaggctcgaagctggatttcaagcacggtaccgatgcaacctcgtggtgtgtaaagcaatggctggacgccggagctataatcatcggaaaaacttctatgcatgagattggactgggtgagttcttattggtcatcatcgagtttcagtagctagttaactaatactctccagacacaaccaacaataacccgaactatggaacacctagaaacccccacaataaggagtactattgtggcggttcctccggtggctctggatatgctgtcgcagcgggccttatacccattgcgctgggcgcagacggcggaggctcaattcgtatcccgtcgtcattttgtggtatttggggcctgaagccttcacatggtcgtgtgtccggtgcgccatcgcaaagtctcgcgcccagtgttggcgttatcgggcctatggctgccagcatcgatgacctcgccctcgcctatcgaatcatggccactccggcaccagcttcagaggacccgatttcatcgcagttcccctatcctgttccgccggactctgatgtcaaaaggacgaagacaattggtattgtgcgcgactggatcgaccgcgccgagggccctgtgcgcgctgcacttgatcgggcgctcgactactatcgcgagcaaggctacaacattatcgatatcacaattccttaccttcccgagggtcagcgtgcccacgctcttaccatcatggcggagatcgcatctggcgttgatgcaagcaagatccggcagctcacagccccgaacaaagtgcttgtctctatgggcatgtaccaggtcaccgcacaggacttgctcgcctctcagcggctacgcaatctcctcatgacgcatctcgcgcatctcttcaagacccaccccggtctgctcattgtttcgcccacaactcctatccctggatggcatattgacggcggtgaggcggatttatctcgcggtttgtcggatgctggatcatctgtgcgcaatatggaatatgtttggctggccaactttactggttgccctgctatcagttgtcctgttgattatacccctggcggtgtgcctatcggtgtgatggctatgagcgaatggggcaccgaggaagagctgatcgcctttgctcgagatggagagcctatcttggacctgcctagtagttcttcgcccgaggaaagtgaaattgcctcggcaactaagggtctacgaactccttctgatgatctctctgtgtgggaagatattatcgcacaggccaaggagaagatatccaattaagcagagtcaattctaatcaatggtggccggttgatatttttgtcatttattatattccgatgtgttcatttacaagtcacgagacaagcctttccttagtctgaacaatatacgtctccctctgtattttccaactctctctctattcagactttcaaactcccctcattcagtccaacctttgcactattccttgctccagtgccgcatccgtacgtgcatcggcgcaccatcttttgggtgcgacgttgctttcccggtggtatacattcgctcaccctcaacagtccgccggtccactttcaagccctgcagttcccgcagctcatcccattgatcccaggccatctcaatatcaaaactacgtacagtaaagaccaacaccaatttgagcacaacgaccgccagttcctgcccgatacatttcctaggcccaagttggaacccacgccagatgtttttcgccggatgcaacctgtcgccttctagggcggaaaatcgctccggcatgaatttgagcgggtcgacaaagttcgctggatcatggtgaatggtgatagagctgtcgaaaagatcgaacccgtctgtcggccaaggctcgtcctcgccgtttattttcaggttgaatgaaggctgaccttcccgaatcgtgatcgttgctggattcatgcgcagtgtctccttgatcactcccagggtatattgtaacgagtccaggatatgaggcgcttcgcgaatcttttctgcggcaacgcttggatcggagccgagaatcgcgtcatgttcagctcgcaattttgcgacacattccgggttcaactggagttgtctgaatacacggggaattgtgatggacagcgcatcatcaccgccaaagaaaaatatcatcagctggtagaagacttgttcgatgaaggcttcatctgggggattggcggttcccttgcctccaagctcgccagtatactcttcaactgcagaccggattatggttcgtgggctattgctagcggcgtttataccgtttgtgataaacggtcggagatgtttgaagagctggtttctcttacgttgtacgatcagtttgaacaacggggtaatcctccacagaagcttgcgagggctcagagttatttccatgcggctcaattgctcgcggtaagcgatagtgaaaggggagggatataacgattgggaattaagccgggtatcgctggagttgtcagcgaaaaagtagtgaatccccatataagacgatcgataggcttgacttacagaaccaccctccccgtgacatcaaatgccaagttgctagatatctgctcaaaagggaaaacctgaccccattgaccatcaccaccggaaaggcctttgagcacattcgcaaaggcatcaacctcctcgataatagcaggtatccaggttctaatattggtccgactgaatccggggttgaatctcgagcgccacatgtgccactcctccccgtgcatgtagttgaggtccctcccattcgaaatgggattcaaaaattctccttgcatgggagactttggcaagctgcttccaatctccatttgatttgatacatatgcctgtagggaaaatgccatcggtctggaaataggccatacgtcgaggtaaatgacagggggacattgttgctcatttggaaagaatttcggccagtatctgctgatatagaaaccaaaggtctgaatgaagttggcatcaaaggcccagtctctgtaaaattggattacgacgagaaaatgtcctaataaaatgagtgaggcaagattggcttgcgatgttagcttaggattcttttcggtgagataagagatgtacgatgccttgagactggagtcttctgaatttcattcttgcttgatatagctgcacggtaaacctgaatactagcactgccacaaccattatggtaagcaaagacattctctgtccttttcctaaatcactaagcctgggcgatagtagaaacggaagcatggctgccgtttcctgagatgaattattgttgggtgaccggaaggcggtcacccatgtgggtctagatcactagatagctccgctccctcttcctctctttctctctctctcctcgtccatcagatcttagcgaatccacactagttgctttcccttttcaggtataacgtagttagatataccattaggttataagtacttgtctctagctagtaaggactgctagcaacctctaaccctaagtcttttttcctagaccctacttcccggcgcttaacctatataacgcgcgtttcctaccaattagatttaatcctagtaaagccttaataataatagaattagtataccagctcttagtatagctaatagcagtattaactctagggataataacccgaataattagttataatttttactattaggtaataataatatatcttaggagataggaaatacctcttaaccctagactaatataatattattaggtaatagatataataagaagaatcaggctactaacctacctaatatctcggctataaaaatatagaaagttaaagtacttaagtataattctagaaatccttatagataggcgatccctattaagtttactcttatactattaaggctagaatatattattaatagtagtataccttactctactaagggtaacctaaaatttaatagataggagtactagttatatatagtagctagttagctttatatttaggttaataatatactctaagaataaatctagaatctcttatacctcctagaatttactgatataatatttaataaaattatattaatagtataaggctctgataaggctgaaaatatactaaataaaactaaaaagttcgataaaatgaaataagcggactttaatactataaaggaatttattatagaatactagaaataatactatattcttttataatttaaaatttaactataccctttttatatactattataagttctatagtaattagataaagaaatatctaaggtttaatttattattaaggagattagtaatattaaactaaagaaaattatactcgaaaagatagactagtattataagagcctctaggtagtttctaactaagaagggactgctaatatagcctagtccttaagggaatagggtaataactatagtagaggatatagaggataaggtactaagaggggtagtaaaggaggtaataataaaacctccttaagctaagaaaataaatctttaaaggatatatcgaccagaaataacgtacttctgtacattccttatatctagtggtatattagtagttagtagctatatatagcgattatataaatatatactaagatagatctcggaggagaacnnnnnnnnnnnnnnnnnnnttaatactataaaatctactattagtaggtattctaactagttatcctagttatatttaatatatagtcttaattactatactataaactaatttataatttcgctctagctatctatttataggtggtatatagtagatagtttctacttaatccctaggattttatagaactctatctaaaacttagagataaactatcccctttagtctaatataatagttttagggatccctataatctatataacgttatctataaatagatatactatctactttatattagtatctttataataggggattgatattagtctcttacttagttaattaataataataaatactatattatagctatatctatcctttaggaaggaatagaaatctattaataaatactactatagttatttaggaatcagtaataggtataggagactaggtatacgatctctctaggtctttatatatttatatattatatagttatctatatactactttatatctataacctattctaactaatagtatcttattataataagtttcttaagtttcttaattctagggtatatagttaatagttattagtatatcttattaagtaactatacttaaagatccctttcgttagagacttcgagatagtctttaaatagtagtaatctgtcttatactacctaatagggatccgtttcctatcttatagtctaatagaatacttttagcttagggctctagcggttcgctaactagacttattcggttatatctaagttctatatagtcttaactagtagagggagggcctttatatcctatatagattctatctataatagggatatctcgatttctagtattaatttcgttttttctccgaaatattccttagggagtaatataaggtattgactgatatctatataagggctttccttccttaaaagaatatctgcgataatattctgtttcctaggatagtatttaattataaagtagaattgtaagaggaacttactctactatacttattattaatttatctattatactattataaaatatttaagagactgataatctataaggatctcgaaatgttctatataagagagccctttaagttctagtcgctattcttaaagtatataaataatcgcgaggaattccttatccctgattttataattaagctctataggttatatagtctttaagaagaaggtaataggatactaaaaattgttagccttatgatattataagaggatagtactaatgactccgtttaaggtatctgtttctatataggtctagaggtcaggattataatactataggataggtatagttattaacttatactttaattatataaatacttacttacagtccggcgactatttatatactatattatactatataagataatataacagttttaaaaggaaactgtaatccttaataaattgttaatagaagttatagaatcctaagaaggattgtattcccttaattattaatagtatcttctagttcctaataactgcgatcttctctagatctactataataccatcggtacttataataaatcctaagaacttagttttctatatagagaatttatacttagatagtataacctataatcctactctttatagttatttaaggacttctctaatatacttcttatattcttcgagtatctcgctatagattataatattatctataaatataactgcgtagttgtctatatagtctctaagtactatatttataaattattagaatattataggactgttcgtaaggctaaacggagttactttatacttaaacgatctatattaggtatagaatattataagatcttctatagctagtgttaacctaatatagtagaaaccttagtagatattgagctttataaagaattttactttacttatttattagagtactttatcgataagaggtaacgggtaataatctttccttataattatatttaatctttagaagtctatatagaaacgtagactactacctagcttctttactattaagattagtaaagtatatagagctgaactaggaataataaatcctttcttaagattatcgaggatatactattttatagcttttagtttatctaataataatttatagagtaggtagtatcctagctatacttctgctttaaggataatattatggtctacccttaggtaatatagtagtagtttattagatttcttcttagagaatatttctataagattataatattcctataggagggttcgtttaatcttattaagttctatatcctttataatcgtagatttaatatctataatctaatcgattttatagagtaaggtctaaaagacttcgatatctttattaataactatttatatttataaatagttaaatcctatctaaccaataatactaatatctattagtaggagaacttcctttatttcttcttttagtatctctatttaaagaggtactagttcgattttattgttaaggttctattctatcttataatactctataacttactaatacctatattaatactcttttataatagggtatagcttctaagtctttaggtcctactatagattacttaaggcttattttttgaagagataattatattattctatatccttctagtaatctaacttaatttatatagaccgcttaaggattgttataagtataggtatagctaactagcctactaccttattaaaaagggtatttttatctagctagattatataataccgttagtagttaaggaagatatcgttctctacgaactatatatatctaataatcatattatattagcttagatctactactaatataggaatctactactagatctaattatctatacttagtataagaataatagtatatataataggttataataatttactgttaaatcctctaactaggtacttatagtctagtttatagatatataacctaaatttcttactaagtagtataactagttctatattaataaatattaaactatctgctctaatatctactagcgctaagattataaaggaatatctattataagtcagtcttatattaaatactaagctatcttataaacctcctaaaagcttatatagatctagtatatatagtaatacctattttctacctaagattaagacttctcctaggctcctacttttcttaggtctatattatcctctaattcttcgagtttaattatatataattagctataggtctagttagttgtagtaatagcgcttacagctgcgtttgcctttttctttaggtactcgaacgttatataccccttttccttataataaaagtattaaccctcctttataagagtctcttgctctatagctaatagtctagataataaggtagtccctttatattttatatatagggtaaaaccggactagttagcagtagtcctaactctacttctaaatatagttattatatagatatatatagtgccctttacttcctattagagactaatcttataggatatactttagtaactctaggtaaaggtatcgaaaggaaccgtttcttaattaatagtctatataacttaactctataatagatatagaagttttaaatataggttatacttatagttttttttaataactatggcttcttctataagctatataaatttagctaagaagtcggtaaagtcttccttaggttttatcttaagtttatagtaggctgtatatacttctatataataatttaggtttataaagatagtatagaggtagataataatatcttctgtgttagtatataggttatttaaggttatacttattcttagggtaatatatagctatactttacctttatattggctttatatatatagtttccagtagactagtaataggtaatagttagtatttactttgagcttctatctaataactgtctcctatatttcgaaacggacttcctttctatcctttaatattagtatattaggtatctttgtagacttctaactagtgactcctataattagtatattactttaggtttagtttatttcgctctaagtaagaataaggtaataggtaaggttatcgcgcttatatatagcgatatctctgtaggtagtagccttattatattcttcggtagcttggttatattctgttataagataatctttctctatatagagttaatcatattcttctataagtcgatcacattcttctgtaatttatctaatagcttccttagaccttctgttctctaagattaagacctagatttcgttatatattatctagttattatcttcgactatttagaactaattagctagcttaaggaattgttccttactaggagttatatatataatcttatagatagaaagagtcgaaggactctctttagggctattgtatttaatactcttaattaggtcctgtgttttagtaggagtcggggttttaggattagtagcttcttctacgagataatctagtactacgggttattttcccttaccgatcgcggtaatctattatggtaggactataactggtcctattctagttagtttcgggataggtagggtgaaactggactaggataaattgtaataattatctatatagtcgtacggctttagaagtttgggtttagggtgatacttaatattatattatatgctagattccttttaataaaagaagtgcatttctaatcgaatattaagtatggaaaaggaaaagaaaagaaataaacgtaaaaataataaatgggcttttatacccctttaggggcaaagccctattctcgtttcccctagaaggaaggtgcgactgcctgcgcaaacgactaatagtacaatcccaaacgggaaagtatgagtcccacaagtgccaatcgtgatagtatataaggataatatataggtttataggtcatataacctaaggaggctgtataggtagtatatattactcctatctagtctacagtcccccacgtacccaggataggtgctccacgccctatgacagggcttatacctcaggcatcagccttcttagtactggggtcctgacaatagtatatataacgaggtccatatatagtatagttatataactgtgctaagaaatcaggtagccatagtctctaactgatgggactacagtgtagtgatgcaattgaagagggagagagttgtcaattcctaaagggcagaatgcctaactatctagttatgggggttggtgcctgccgtaccgggctgatggtcaggtgaccaccatatccaacacacccccaggtataatcccgaggaatgcactcgtctgtttatttgttatggttttttttttttttttcattaggcagaaaccgtatcgtctagtaaaaactgccattactattattaataaaacaaaatgaattccagtgctttaaaatttgtataacgtatatatactatactgaagtgcaccttatcactgtatcaaggaaatctatcagaaatgcaaggacgattatgtagcccatagcatagctgttgaaactgagcctgaactttgaaggttagtgagactggaatagagatccataatccattggacacaagggaggaccgcttgcttctaggaggaccaggtctgcaatgatacagcaactcttttttttttttttttttttttttattgggtagaaactgtattatccagtaaaaactgctattactattattattaatttttttttttttttttcgatattaagttattttatctaacttttacctcgttaggtttccttattaggtatcttggctattatcttcttccttattggtttaaaaagctcccgcgccagtggctttattagggtatctacaatattttgcgtacttacgataagtttgagtttaataatcccttctctaactatatgcttaataaagtggtatctagtatctacctactttattccttttaagtagttatccttttttataatagatactatattattactatctgagtagatagtaattagtagtttctgttattttcctatctaatctataatctttaggaactatatatactcgcgaattacggtattaaaggtaatatactctactactatactacttctagcgataatttcttctttcttagaggactagctgataggtcccccggtatagtaaaagataaataccttagtgcttttgctatccttataattataatacaatatattaatatatctaattagactagtcgataggtctttcctaagaaggatacctaggtctattatccccttaatatatctattcagctatttaagtgtatcgatatcctcttctcttagggcagaggctcttctctagagtttattaactataagggtaatattaggtctcgatttatcggttagctaccctagcttaccgatatcttcgataaatcttttcgcttcctcttttataacctagggttaatcttcttcgagatcattctctatcttccttatatctttatcttcttttaagttcgtgatatctagagacttatatattatttttattaggagatagacttatactacgctctgtaagccagcttttataataatctcctctatataggcctattaatttaagaatattccgagttttccttaggagaggctgctccctagaaatcgatctaattttcctagattatagtacttaaaggggattttatctttaaactatttgattccttctttatttaataacgcgattagagtattatctatatagagtagaatctagatatttagttccttatagactataatgtagggtttattaactagtggtttaaatcctatcttttttagtacttctgcgattatactatactaaagatagcctacctaccggagtctatatattacttatagaaggaagtagacctccttttcttagtttaggttatttttcttaaaccctactagctactatataaaaataatataattatcgataatcgcgtttagatatactatagtataatcgacctatttaagaaatatattatttacaaccactatactaagaaacagtcttattatctctccttatataattagtatataatttttatcgaaattaatccctagtctttacctatttctatagactacctagtgcgctctaaactcttagactatattctctttatcgatcttaaggttaaagatctatttccttaataggattattactctagcgggtagttacttaataattttatatatcttagctacttttagcttttcgatttacatttctattatagtatactattagtctttctacttcgatactatagcctctatatatatctaagggatcttaacgttctataacttaagttattatcctattagaggtagggtaattgttccttattctagtcctttttcggtagataatagagtaaaacctaccctaaaaggtaaatttatctagtaatccttaggtactagtcctatctccttatctctatttatagtatattataatcctccttctctactctagttatatactctatactttccctattttatattattatagtatttaggtaggtaaccttttatagatcttttggatcggtataatagttatagtaggtcgaggtatatagggtttgtattaacctatcttatttctagttatcttaatagtattagtataggaaacagtgagtttagttctttaaatactcctagaagaggtaggtatatcactagttctttataaataattctagattatagaagtgatatttattaagtaggttaagctagtatctctagtactctttatataagtacttatactctatcttcgagtgattcttcctatagaacttccttatcgatattatagaatagtttagtgtcctctatatttatagagtttatcttagagtcttattaatactcttcccttaggttagtatactctacaattatcctaaggtaaagattttagaaattttttaatagtatttctattactactcttatatttttaaagagtagttctcctattataaattatattttctttactagaaggctatcgataatctcttctcctatcttaatttcgttagttctattatatatcctaggaattcttatttcctaaaaaataacgtctctatatatcgaaactttctttattttaggattatagatatagtaatagtacctattatctcctttatatcctataaggtatccaatctatactctaggatctatctttattccttatatttaagtttcttttagtttatagatatatactttagagtactatactcagagaaacaataggtttattacctcttagtctccttataggtttattacttttctctaagtaagtattaggactttaccccttaaacgagctagtcggttaataatatataccgctatagttactacttcggtctatagttctattaaagtaattcctatattgatatatattatccttactatctatataatatagtaaccactatatttagaaactctgttctattcgtaggtatatagtattaaggtactaacagttatcgatacagtttttacctaaatagtaaaataaaaaaattcctttctattattatatctctattctattaggtagtaaccggtatatcgtttaaactattcggtctatatcttaagagttaataatatattacttttcttagatatatagagtataacttaaaatctagatatattgtctataataattatcgtatattctttatcgattttattatctttaccgattccttttagtttaatagggtataggtcgatataaagtagttacctaacttttattacccttacttactagtcttaggaaatgattttcttagacttcccttttctatataatttgtaatcaaaatatttggtattaatattatatcctagcttatccttattaacttatcctttatagcttcctatatatctaagtctccggtatataagtttagctaagattaggatatatactagaccttctccttctttataatagatagggtaaggcttatccgctagttcgataataggaatattctttataataaacgtataccctattacttattaattactatctttaattactatattattaggattctatcttatcccttaatcctagtgtatttttattagactaaggagattgaacttattccctggcttatatatataatagacgcgtagtttatatcttattccgtttagtttctagattagtaatataatatcgctatagccttctgcgactacttactgtctagtacttgaatcctaactaattgctattcctagtttatatatttcgaatataataaaaagttctctgttcgagtagatatactaagaagatcctaaattaagtatctaatcgatactattctagaggagttatattagtttatttactattactattctgctaaagctctctttatcttatactattactatttctccgaaattgtagtttcctttattagtggttgctaatatagcgatagtattaaagtttacctattatatctaatcggtaggcttcctactaacctattaactcttatttttataaaattagcttaatatcttctagtactataggctaagcttcggcttccagttttatagtctttcgtctactactagatagaaataatcttttatattataaccctattccctatagtaggaatagttcctattagtagtatattatatcttatagtttctctattcttcgatatactttcttatatattttctatatagtagagtattagttaacttagtctttttacttaagatttagcagttattctactatccctttagtacttttattaccgatactaatatactactattaatattaaactctttgaccttatcctatatttctaagtaatataggaagaaatcttagattattatttctactatagggtttttgattgatttaagtttattatttttaattttaattaagcttcgaagttctataatctcctatagttagtttactataataataatcgcttagtatagtggtatagtagcttttagattgttagctatcttaaactgttattttagtatattaataaactctattattattaagaaatctattctctttattccgataaattgaatgattatagcacttagggctctgtgtccttccccttatatatatagcttatacttatatataaagttattagcctattttattcttttcccacttaatataatatatttagcgatatctaggtcgatatatagttatagctaggtactgacttatatacttagttttatctaagtcttagtattagcggtatctcagtctagtctctcgatgtttttatcgattaaccggtataaactataacttttaagaatcttagtcactattctaagctaattatcgaaatcttctttttcctttaggagtagttctatcttatataagacaaagctactaatagctaggagaccttcactctagtctcctattaagtataaggtatcttctaccttatcctaatctttattttttagtatactaacccctataagaggttggttggctgtttatactagtcctatactatttcctagatctgctattataagcgatctcttatagagttaggattattgtattattaaaaaatgttaatctttttctcaatcgggtggtagtattcttagattaatccgtttttgtagggccggcgaatttttgatttatcgcgttatacgttctacagcggtccgtcctaccaattgtattgttttgtctagtcgcgactctctctgcgtgagtcagacttcgttttaattaatgaatgaagatgcctctttactgcaatgattttagcttgaaaagcaggggtcttataacctgtgactccgtcaacacgcgccggtctgtattcactcaagcctactaccggagtccaggatactactggattatatactgatgcgactacagtgtagtgatgcgattgaagagggagagagttgtcaattcctaaagggcagaatgcctaactatctagttataggggttggtgcctgccgcaccgggctgatggtcaggtgaccaccatgtccaacactaacgaatacagtatattagttggcctataaactcaggtatcttatatacgtaaggtctggctgagcagttgtttactagtaagagtatatagttaggataaagggagataccatacctatatatacccagggtgtaccccaatttattattacctaatagtaaaaattgtgattaattattcgggttattatccctagagtcgatactactattagctatactaagagctagtatactaattctattattaattaaggcttacctagatcaaatcccattagcaaaaaacgtgtgttatataggttgagcgccgggaagtagggtctaggaaaaaagacttagggttagaggctgctagcggtccttattagctagagacaagtgctcataacctaataacgcatctaactacgttatgcctgaaaaggggaaaacaactagtatagattcgctaagatctaatagacgaggagagagaaagagagaggaagagggagcggagctatctagtgatctagacccatataggtgaccgccttccggtcacccaacaaaaagtgagggaaagggaggagtagcagcgaagacgggtcttttatgtcggcggcattgaaggtaggttacgtgacagcgtattggggcgctaaacccaaaaaggcaaaactaacctaatacagtaattcacaggtccgccgtttacaatatcaatctcatacttacaaagtacgaacgccaattcaacactccgtatgcagtatagattctccatctcttgcttggatatactaagtttaggtttctagtccatggatatatgcaaacacggtatggatcgtggtatgttcttgttgagccacgtcagatattcttggcagcatgatatccatcttgtatacatccagtactgaattttggtggattgaaaatcctcgagccccctatcttccacactggttcccttgagattgaaactgttttcctcgagtgcagaagattctcctgaattaggaagtacaatttgaccttaaacattctgttttattatacctccaccggcgggtctaaacactttcaagaaacgatcagattttagcagagaacatcaacataatcataggttttaggacatcctggcgttctctttttcgagtatagtgattatttggagccgtgagaccgatgataccaatgaacgtccgatttgagaccctcgtttatgcacgtctgcttcatcttaatcagttcgttggtatagactctcgggcctcgtcgatatctcaatacctagatccacatgggccttttgggagagttgcatgggccatcaaagtctatggggatatctatgtctacgtagtcacaatctatcatgtacatactaaccctcaacgatccccatctaacataaaaggctccatgttaccttcaatatgagacattctctcatacagtcccattttaacaaccagaacaacctaaacctttttacacaagatgcaagtggcatcttcttcttccgctgtcccagccattccttccgtatacgagaccgtgcaaggctacaaggtccccgtcttcttttcgtgctaccccgccggaatcagcattgccgctcgcaaagtcgaagatgcccttagaaaaatcgacgaggaagcatccgaggaaggtacacgggaaagacgtcgagcagtaatccgacacaccaacccctacggtaacccctttactatttgccactgctcggcgcctttccagacagattagttctgttgtctacgctggtcgaagtaatgtggatccatgatggtgagaccctaatgtgctcggcatatatgtagtagtgtgctcacgacggaactatctacagacgtgacagaggagatggatcatatctcagtaagaccactagaagtttgtaaatggataacccattaacagtttacaggcatgccgagaacacgacgagctggcaaaagttcttcaaatcgacattgacccatcgatcttcgaggctggaaatgtgcgccaaaaggcgctggcggtcgtgctccgaaaggcaatcgacatcgaccctaagcaagcccccgatatgatcgagatgctcagaaaatacctggcaacattcgacaacatcggtggcgacttcacgcgaatggaggagtatatgccctaccggatctccaactgcggctactggtaagatctgtacccttctaagaaaatacatggtaaatgtctgttttatcatcaaggatgtcctcttacttcatccgctggggaatggatatgaccctcagtgaggaggactacgccagcatcgagcaattcgacattgcaatggggaatgtcctcggtctgactaatgactacttcagttggaatatcgagaaagaccaggagacagatcgggtgagaaatggagtggtggttctgatgaaggaatatcataccacggcggatgcggcaaagatgattcttcttggtgttattgtcgaacaggagtccctggctgcaaagctcaaggaggaaagattgaagaagccggcttcaaaggagatcttgcaatatttcgaggctattgaactttatgttggtggaagctgctattggcattcgactgcgcctcggtatcaggtctttgaatgaaggtagataaagacactggtgcaactctgaggtacattttatagaggaatagatttgtctagtaaaggtcacggactttcatcgactatcatctacgtcgaatatagatgcattaaaaccaatcgatggctgaaaaatgaatcagattaatatacaataaatgaagaagacacgctgcatcgaaatagacaacaaaaatcctcctcgtagtaatttcatagatttcaaatccatattccctcaagaggattcgggataaagaattcgcaacccagatgagctgcttcaccatgagcctggagctccctcagaatctgttctccggggtgaggcccatcggtaagattctccttgacatgaattatgtaaatcttcaatccttccagaggaggatcagtatcagcccaagtcccagagtccggacttcgcagaacatccccaaggtccactttaggtatctgaggaatttccaccgactctctcggaagcggacgagactcaacaagtgactcgggcgtcctgcccttatcggcaaaggagcttagagtccgtttcgagcgcgggctcacttgctcgctgccggtctcgaccgggtctgcgggttcgcgcttgcgctttttatcacccctgttggaatcccgcacttccatgacccttctggctagcgcggtgagctcggagactagatgtcgtggacacatgtggccgtacagatatgagtcgtcggtgctgtcattgtaggagcattcgatgaagatcgctcgtagcttgcccgtggcgattttcggggcggcggcttcccatactcgtttgttgtgcgttcccagggaaactgcatccggctcgacgtcgccgaagacgatgatctcggagccgctgtaatgatcgcgcaggaagaaggcagagctttcgactgtttccatcactggctctttggatttggatgggagtagatgtggggagcgagcgggagaatagaaactggcaacggttaggaaattttcgtgtacaaattgcgaatttcagcttacctgccatcggtatggtccactgaaatcgcccttgagggaaacatcaagtggtgatcagaaaagacggtactcccgacgcgatgaggccccccgttttctggatggtatcgctgcttgcaccggccgtggctcacgctcaagcattttgtcaataggccattacaagccctgacatagcctctactatcgccacgaccgaaacgagggtttccaccttccaccaagcgctgatatgtgagtagaccagcgccgccatcctcgtcagacaagttaggccagatgacatcgttgaacatgtggttcttgatagcggatagcacggatggcaaagcggccacaggctttgggccattacccgcctccagaatcggggtgttaatcgccagtcctgagatatgatctagatgagggtgtgtgatgagaacagcaccgatgatttcgcgaaatacatgcgctgcatttgcctgtgctgttctgcagggtagctcaagcccttgaaagggcccacttgtcatcaccccccgatcatccttgcattcggggagaaaccgttccatcaatcgaataattcctgcaagaagggtacccgcatccacggctaccactgagttaggagaccatttcgttgacgttgaccggacaagaatgcctgtgacgcagtcttcgcgaggtccacctgtcgggccctgaggggatcagcatccagaaaagaagcagttgcagggctccgtctgctagaacccgccatcaggcaagctgcgaaaagaacattccatcgccaagatatctacgaaagctcgacatccggccctgcacgtgacgggttctgcaacggaagcgaaacaaatcaacgggtcctgacttaccaagacaatgacgtggaatgctgggttctcagccattgttccacttgtcccgcccgtcatggacatgtgagacacgcgataagctagacttgtcacagcccaagagcaagtgaagctgcccgagcgcgtctaatccccaatagtagacgggtcccgacaacaaaatgtttcacaaaggctcaaatgagttggtcgatggtcgaatcaaggatatgagaggcggctaataaagactgaaaaaaaaaaaaatgaagaagagattacgtcgcgatgcgatatcagcgcccacgggttgggattcggactgctcaaatatgtatgttcaaactgacagcgctctgcatatcatgtgtcatgcacagagcggtctatctccaggaagcagagttggtcctagtagggagagagagtgacaggcgcgaagcgacagaaatccggaggctggctgagtgcagataagagaactccgatttcgcgggggtggagatttccccttgtaccacaatggtatcacaatgtggtgcgcaagacactaatgcacgtaaactgcagtgccgattggaggatattttagaaagcaaagagacgttcgatcggagacaccgggagtggacctggtggattctagtggggtatgatctcaacggagccacggattcggaatgaagatctggggtttagtgagatatcagatcaaggggagacgtctgagggcagcatcagagggagttgattttgggcgatgatgttcacactacgattcatacattacacaacagattcagatggctcgagatatacattgttagtgatcagcgtatgacctgtcaatagatctgctgaatttcaagtagatgtacagaattaacataaagagggtatgcggtcaaggacaaggatagcaaaacgactgtgcccttatacatgaattcattgaatgactccccaaaggtaagggatgatatggacacagtccattccaatccagacagaaagcatttcacaaaaaccaaggatctgccttcgccgactgctataacgccttccgtgagcccgctaaataaaacaacaaagaaatgatcagacaaagcccatcatgcgccacaagatatgttcaaaagcaaagggggaatagatgttgcatcaggaccgatcgttggcctctgaattttgttcattcaagtctctctccaccacagtctggtagcttggtagaagttgaccatcatttgatggacagttggggtcgtcagaagacccaaaattagggggacattcacgagagacatcactgccccggcgactgccgtcgggactagaatattctgggggcggggcctctggctcttgattctcgggagctgccgcaccttggccctctgtctcggccaaagcaaaccggctggagccctcgccagcatcttcatgggaagaaatgtgggtcagctgggcgagggaaatgtcagtcggtgatcgagaaggacctgggctaggcgccaggggaatcctaacacttgagcctgaggtcgcgtagtttgcattctggtaaacgcgttgggagatctgagccgcactctcacggccggactcaagtagaatgctgccttgttcactgccatagggtgggggcggtgcgaggctaccagtcatgggagccaagccccattttttgacattgccttcgatgaatacaaatcccatttggccaaagttcacatggatagtgcaaggcccgttggcaccgatggtggggaagaggttttgggagcgatagttgtgagccacatcttccaatttcttgccgttgcgtgtgaagaagacggtgccggatcgaggtcggtagcctacaccaacaacatcgccctgaaggagtggaggcccgtatggagtgggggtaaatggttgattgagtcgacgatgtcccgtagattggtaggcaacagaggttttatggaagcctagcggttgttagcgggaattcctcggcagaaacacttctgcaacacataccaggcattcggaataggggatatggtttcgtagtcacaccgatgccgatcatagtcgattcaggcttgtcgtatatctttgcctcccagtagtaaacatcattctgcttagggattggcaggttggtctgtacactgcactccgagtcgaaaaactcaatttctgttcgtccttccacaaagcagtttgcaatttccagctctggttggaattcccaggcggatacacccttttcttggattgcgaggaactgcgatagggagatgtcggtttgcaaggactcgggagggtttccttggacaaaggctgcagacgattagcaaaatgatcaagcgactcgcacgaaaattcatctccagtcttaccttttgctcgcaaatactccgatcgcgccaagtcatccattgactctagagccacctcttcctcgcgcaagaaggcctgctcgtcatcgtattcaccgggcctgccaatgcgatcgagcataatccgcccccggcgggtatatttgaaaaagaaaaagatcgctagaacaacaaatgcgacggcagctgagccaaatgcagacaagatcccaatcaagatgcctttgccggttgacccgctcgagttgccacttgccagcataggctcgggacgaaactccatcgacaaagaggacagcacattttgtagattcgcttggatttgttgccgcgagagtgacagatcgctttgaatgggtgtcggtgatggtagtgtcgaggagacaaagccaatcggtgacgtcgtcgggttgcctattaccgtgctcagggttgatggcaggcctgcgagcgcatcggggctcgaagcctcaagaccctgcatcgttcatgtgtcaagtgacagcacaaagaagaagaaaaaaaaatcacgagaagtcgggaagtagtgagtgaagtgtgcaaagaggaggcgagagagagagagagataagtgggcgggatgaaatgggcgggttccaagttatctaagacgttttcggccgtggactagagccatgcactaacaatgcaaggcaatgtatgttgagagttggttcctggactgaagatccgggattctagaatgttgaaagaatctatgtctttgtgtctttgtcttagagaaactaacttttcatttagaaatagctgtgatattagtactccgtatgttgtagtgtcaccgatatgtctatctatccctaggataagcccttctctcctcttcccctctcctagctccttactggaatccctctctcccctctctttataccattccttagattcgaagatgcgtgcaaatagaggtgcccaggggtctacggctcaggacgtcatgatcagttccctcgactcctataatatccgcgtagtgacacctacctcctgcgataaatacccaggtcagtacacttctccctagagcgaacattgcaaggtcggaatgccttcatttgccttcatttgccctcctttactttctcacatacctgtttgctactccaccgaacccccgatcggtgatcgtgagactcgagctgacttgaccgcccagccaagcaccatgcacgtaacgtcgcccggaagcttggagcttcgagtggcttgatctttctctccggacagcccacaattaatctgcgcgactccgatcaatcgcgcccattccgacaacgacgatacttctactacctgagcggagtcgacgagcccgactgcttcctgacgtacgatatcgaacaagacctgttaactctttatgtcccggatttcgacctccgccatgctatttggatgggaccgaccctctcacgggaggatgcgcaagaccgatatgacgtggaccatgtacggtatcagagctcgctcaaatatgagctgcaggcgtggctggacaagcggaagcagggcagcgagctgtacctaatccatgactcagaaaagcccgagcatctaccaaaagacctgcctctgaatgtggaacagctcgggcctgctatggacgcagcccgaggcgtcaaggacgagtatgaaatccggatgatccgccaggccaacaaagtctcgggacttgcccatcggcgaatcctggagaatatccagactatgtccaacgagtcgcagattgaagggtcgttcttgaatacctgtatctcgcacggcgcccggaaccaggcataccagattatcgcagcatcggggcccaacgcggctgtcctgcactacgaccgaaataacgaacctctcagcaagaaaccccttgtctgtctcgacgccggcgcagagtggaactgctatgcaagtgatgtgacgcggaccttcccgcttaccggcgagtggcccagcgactacgtgcgggatatctataagctggtcgagcggatgcaagaggagtgcatccagctgattcgaaaagggacgcgctatctatctctccacgatcttgctcatgacatcgcgatcgagggtctcctggctctgggcgtgttgaagaacggcacgaatctcgagatccgccaatccggcgcatccaaagtattcttcccgcacggtttgggtcatcatgtcggccttgaagtccacgacgtgtcggagcggtcgatcatggctcttcaccaggggttcgatcagcttcagtatcgcccgatcttggactctacctgtctttcgccgtgcactctttccgccccgctgctggaagagggaatggttgtgaccgttgagccagggctctatttctcttctctggctttagccaacgcgcgccaccagccgtctgcccggtacattgatttcgacgttgcggaaaaatacgttcatattggtggagtgcgcattgaggatgatattctcgtgactgcgactgggtacgagaacctcaccactgcgccaaagggcgaggaaatgcttgccatcattagaggatctgcatagtgtagtattaagtacgttaaatagcggagatatccattcgtattaggttcaacaggctacaatctatcccgtttccgttgggcactacatagaatgtgagccctatgtgggagttacaagacctggtcgggcacaactaaagaaaatatcacaccgccagttttgtagacttggcagcaagctaacggatgtccaaagtgtcactatacaagaccataaacaaagccagctaagacgggccgcatcgcaacccaggattgcatcgggactcggcaatcctaggggtaggatagatagtacaacataggatatggcacgtaaagcgttacacgagatcgggagatcggcagatcacatccatggatgaattcaaagtggataataacatctacgatagactgaacgaaccagcggagtgcaatagtggcaatatttctcccttgattggaggaggattatggagttaatgtgcatactccgtacgtcaatcttttattcactctatttctatttctgggcaatttattattatcacatttcaccatgttgggtggagaagggtaactatattctatatgaggcaaatatgcaaatatgcagttgaatgtcgactagcgcgtttagaactaaatatccctcatttctttagagttcggagaccgtagcggtactttgtacaattccatgcacttctccgggtatcgctgctcgcatcaacgctaacgtcattgcccctccatagtatagccggatttcccgagtttatcgggtttcatatcccggccatttctcgcacccgagagcggctgtgactcttattccctcatatcttatgtatgttgtacaatattatcctctgttatgcggcggtattgactcatttataattggtttaaatagtataattaaaggctgcaagtggaggaaatacgacatgcagcacagaaaagacgtaataatgatatgtattattatagccgaaagctatagttagaccggtccacactcatttaccagaggaacgtgcccgttgagtagaattagaaatcagaagtcaggtgggctattagaaatggatatggatatcctctttgattgatatattgtatgaatacaaatcgagtctgtgtattttaagcaaaagcaaaagacgagccactccgaactggtctatgaaagcaaacgctcataaaaaaaagactccgtaattccataactgcaaccaaggccgcaaaacaaaaagtgaatgagttttgtcgcctgcatctttgtacatctcatcagcatcagaaaggccgttcccggacgcattttatggcacagtaactggaggtctatctcggacttgacccggagaaacctgcatgggagggagaagaagtgttgtcatcgggtccgacgtgtgaagggccaccgctcgaggatgggtcagacagtgcaggtggtggttgacatgcaggtgattttgttcagtggctccaggtcatcggtttcgattcgcgcttcatattcattggggcttggccagttgtgacagcttatcagcctggtgcagcagcttgtgttgttccaatacgcgttggtgttcatatttcaggagcttgaactggtcgtctagttcatggtgccatgggtataggacgaagacttggaatgccagcgctgacgaggcgactccgaagttgatgagagagattccgcgcgtgacccacatggtggaggatattgagactacttgatcagtaactagcttgcgaatgagtgaataagagactcactgtaaagaaagaaatgtacttattagacgttgggtaaagcgccgaggatgagtgatgagatgtagagcagatgaagagcagagacgggtcttgaagggatataagtaggaacaaaagggggcaaagtcgaattttctcgttccttaaatttgacttgcagccttttcggtataaacataattcgatttcggcaggaaccccgatcagtggacctgcgaatcaacgcccaatccggttagagtggagaaaaagtggagccgtatcgtggcggcaaaaggtttccccgacccaaattcttatctgtcggagatggatcgtatcagtcggatccgaagagataagaaagagcagttcaattaaacttacaactcactgtgtttgtgtctcttggaacctcctaagaagaaattgatcatcgagagtaagtgattcctgagtgtcttggactaagaatactactaacgactgcctcagccttgatcgccctctcccagcctctatacactgtccaagccgaccactacatccaaaatggacaaccaaccgagtgtaacgcagcagctgtttggctgggtaaggaaaaacaaatactcgctagctggcgccaccttcgtcgccagcatggtcggttcctttgtgatggtcggtcgcaacccgcatctgacgagcaaacaaaagatcgtgcaggctcgtgtgtatgcgcagggtctaacgctagctgtcattgtttccttggccgcccttgacatgtcagaccgacgaaagccagcgccgcggaaggaagcggtcaagctggctgatgcatagagctagactgtgatttccagccatcatagacgggggtatagacggggagatatagagatgtcgatatgtatttgtatattacagcctacaacatagaggtctaacaaaccagacaaaatcaactcttagatgcgatgtctaattgttcggtactcaattagactctcaaattatgcatacgttgaattcgtgcatcttcaagtcattgaaagcggtttgcttttgatacgcgttggttgattacagccaagacgaagacatatgcctagtagcattgtcgttatattaattcctcggaccgaggtccttctatgactcagacgaacagcggtatcatcatggcttcggccgaggctaccaacaatggaaggacatggaaatcctatcttgtgtgacggggtaaatagtatccatgataaaggagcttatactttggaaagaaggatgctgtaaaatgcgagaagcgcaaagaaacatgtgagaagtcagccctatttaaagatttgcacgtgtcaaggatgtctatgttgtacaaagatatttcatcaaacgaagtcatagaagactaaagagcaacaaaagatagttagtccgaaatctaaacaacatgaaaccctttgttctattattataattcaataatatatccgagatatccattagcccctctcttccattgctacccgcttagccggacgatctccctttctactgcttattcacagtagtacctgattaaaggggaaatacctcttcgaatagtcgacagtaagcagcttagactcaaagaccgggacaatgatgtcttcgtactcatctccgggtatttaggggctaactatacagtatatatatactaagaccactaacatcccaaagccacatactctgttatttattccatctcgttatccactttctgcatattcccaacaatcttctgctcctgtttaccgccccaagtatacgaagcagccctgaattttgcattttcaatccactgatcacgaagtatgaagaatctgtgtaatcagaaagggtgatcactacaaacttcgaccgggcttctcacagtttgccattttgttaacttgcaaggtatacctgatgcggaagttgcaaaacatcctcctggttgagtggttcattaacacccaaatcaagaataaaccatcttttaagaggatccggtgagtcgaagtcagctgggatatggatgtggtcatagcccgccgggtgaagtgtaggattgaatgctcgattcaatatattttcacagaaatcttccccaatttcgacgtggcgccgttgggggcaaccgtctatatcggtgatgcaggcgtaaatgactattctagtgggatggaaacccatatcaagagtgaagaataaggcgagaaagccgttttgttcggatgttgcgcttcagatgagtttagatagacgctaactatttaattatgaggggttagaatctagatgccccgtggctagtgggttgctgtggctggtcgagtgtggctttcagatgagtgttcatgcaattagatccatgccgccttatgaccctgcagtatgcacaaagaccaatgaaggttccaaggttgatatcgagagaaactttatttcaagaggacttgaaacgcagagggaaggagcgccgtataggatcgccgagcagagacacctcccagcttcaaggcatggctaggaacatcttgacgtatgcgatatttctatatgattagtctgatccatggcatcttagtatgactgggcagtcaaacctacaccataaatgggatacgaataagagcagatcaaaggcaaaacaaagctgaaacaggagtataccgccatcatcgatgtaaccgaaccgtgaataagcggcgccgatgattggatttatgtcatcggcgccgatgtcggagttggtggggttggatcttgaaattcacacccgcctttatattctgaagctccctacctgtaatcgagtcaatcattcctcttgatactattgcataatggcttcttacaatattgttgttttcggtggtgaccactgtggccctgaggtatgtcattggaacattgaacgctcgcggggaatcgaatacaggactgacatagaataggtgaccgctgagggtgtcaaggtaacattgcaagctggaattgggaaagcgcggaatagatgtactaattgaatcccagatcctccgcgtcattgagaagtcccgtggtcttactttcaacctgcaggagcacctgctcggtggtgtgagtatacaccacctacgcgacaaacgccaatgactaacaattacaggcctccatcgatgccaccggctcacccttgaccgacgaggccttgaacgcagccaagaacgccgatgccgttctcctcggtgccattggcggtcccgtacgtctctattctccccccccccccnnnnnnnnnnnnnnnnnnnnnnnnnnnnnnnnnnnnnnnnnnnnnnnnnnnnnnnnnnnnnnnnnnnnnnnnnnnnnnnnnnnnnnnnnnnnnnnnnnnnnnnnnnnnnnnnnnnnnnnnnnnnnnnnnnnnnnnnnnnnnnnnnnnnnnnnnnnnnnnnnnnnnnnnnnnnnnnnnnnnnnnnnnnnnnnnnnnnnnnnnnnnnccaccccgcacaactaagaacaagcctactcacactgcatacagaaatggggcaccggcgccgtgcgcccagaacagggtatcctcagactgcgcaaggaaatgggcacattcggcaacctgcggccctgcaacttcgccgcgccctcgctagtcgacagctccccgctcaaggccgacgtctgccgcggagtcgacttcaacatcatccgtgagctgacgggcggcatctacttcggcgagcgcacggaggacgacgggtccggatacgccatggacaccgagccctactcgcgccacgagatcgagcgcatcatccgtctcgccgccaccctcgctctgcaacacaacccgcccctgcctgtctggagcttggacaaggctaacgtcctcgctaccagtcggctgtggcgaaaggtcgtcactgagatcatggagaaggagtacccccagctcactatcggtcaccatctcattgattcggctgctatgctgatgatcaaggacccccgtaagctgaacggtattgttgttaccagcaacttgttcggtgatatcattagcgatgaggctagtgtcatccccggctctctgggtctgcttcccagtgctagtttgagcggtattcccgatggcaagagccgtgtcaacggtatctacgagcctattcacggtatgtgttatgtcctctttgctgctttctgccattggttctggtggctaattggttctacaggctctgcccctgatattgctggcaagggtatcgttaaccctatcgctactatcctgtccgtggccatgatgatgcagtactccttcaacatgatcgacgtggctcgcgtgattgagcaggctgtgagcaacgtcatcgaggctggtgtccgcactggcgacatcggcggcacagctaagactaccgaggtcggtgatgccgtcgccgccgagctggagaagctgctcaagtagatacaaagcagcctcttcgatgtttctatatgagatatgactagcatagaaaactaaaaatttcaatacccggtttaaaatgcaacatgtatttcacgggcgaaaatatgcctaatgatgttcattcgccggcccaaacccatgcaatcaatgcaaaataattggtatcatgaagacaatgaaactccgataataaaacctccgttggcattttacaaaccaaacaatgccggtacttttgttccttcaaaaaagcccttatcgaatcactggctcacccatccaatccggctcgtctagaccggtggtagtaaatccagtatcggcatcttcactagcggtacgtccccgaagatcatgagctccacgtagggacggacgacggcgccgagcatcagcagaagccgacggcgcagcagccatcttccggcgactatcatcacaagcaaagacctggaatccacgaacatgagtatcctttccgttctgatggttctccatgatgcgcatctggataaccatcgccttgagcacattcccagaatagggatcctccccatcgtcctggctatcgggctcatcaatctcataaaacggatcacactcatcatcatgctcatggccagggtcatcacagttccggtacacgattgtgcgccgacgcatactagtcgtagatcggcgtttcgacttcccagtgtcgttgcgcacccatccaccgtttcgaccgccgacgccctccagcggcacattgacccagccgcatggaccgtcgccttcccaggttgcgaactcgatgaggtcgttcccgcccattcccgctgcgaaaatcatcttggtgggcgtgtagctttcgtcgagctcgaaatccaggtatacgcggatgcgcacgactgctaccagtttgaagaagtggagggttaatgtgtgtggttgtggtccgtcggattgccagtattgggccggggaagggttgcggagggccgcgacgccgcagcccggcttggaggtagagacggtccaggaagcgagcgatgagatctcacgtaggttgggtggtaagggggagggtgatttttctgtagcgcgagaatattagcttgcaatgaatcgtagctgtgagggaacagtacctcgatcgtgcatctcttggtcggggtcctcttcgtcgaattggtcctcggcttcgtcctccagttcctcgtcctcaatatcggagtcatcaaattgcccttcaatagcctgatcgaaggaatcgtcgaagtcgaggggcccgtcgttcccaagctcttgcatgttgtgcccgcgcgggtcgaaatcatcgtcgaagtcgtcgtcatccatcatttgtggtgggagttgctctacccgtgctcttggtcttccaaatattgtaaaagggtttattggtgccgctggatgtcccgccacggcaactgggtcgggtgtgagatcatttagaccggtggaggggggttggtgtcgatgggttgggtttgtgggagtgtgacgcgtgggcggggtctggaattgggcccggaggtttcctggggcattgtcttggttgggtcttgtgtcgcgcggatttggttgtcggcgcaagtgaggcatggttgttccataagttttggagttgatgtttacgcgcagatcgaggggagctccatttccgtttacggttagcgccatttggaaggcatggggtaaacaacagactatttgattcaaatatgaatcctactaaaagaggaaagcatgtagaatgcttttccgtgccatcgtcaaccactggaattatatcgtttatcgtgtcaatgaatgcctttatttctagtttgcagtttgacctgtgctatctattgtccatgcagtttgcgatatataaccacatgtatgcagactatctagctaactccccctttgctgatagctagtgccttcacactcttatgagaaagtatgggccttcatagcgatatattgtctagtgggcctagtaggttcaaattcaaatcgcaagactataaagggcttcctaaaagctcactgaaaccccatgagacattataggacaagctgtgagctgtttgatttgctagcaatgcggcaaaatgttctttatctttcttctaattaaggtttgcaaggtcctcttctgtgtatctattagttacaacaccaaacagatcgtcaatctcggaatccagacggccttcgcgaacaatgtttcgaaagccatccaaataaagcagccgcagactcccagactggacagcttccaagtctgcaaggatgagatacgtcctcgtggaaagtctgtgtaatctcatcgcaaggctctcaataatggcatctcgtccctcgcgccattctccaggggtttgttttttcacttcagcaaattgggttcgaaccccaaacgtatatcatcacaacacaatacccctaccccgggccacggaagcgcggtatccatttatcttcaaccccaggagaaagcggagcagcgatttccgcaagaacgttgtatacgcagcgccagtccggcccaaagttaaagtgatccgcgttatcagggacagcccaccgggattccgcttcaaatgggtctatgtcgatccatgtattcatcaattcatcgtgctcaggccgctcgtctgcttcggggatagtatgtacgcagtgagacaggggacatactatctgcgcgctatcgaagggcatcaacacggtaaggccgaagaacttagaatagtgccgatttcctcggccgtaggcgtatgagacggatcggcatgattctcccaatctcctccataggaataaagttcaggtcgagaaacccggtgactagtttgctcgctattgatcgagggtttcggtcgagagtaattccatttacgtcaagtgcaaggaccagtcatgtcctccatgatgaatatcggccgagagcctgtagacaaggggtgacaggtcagtgttaacggggcaatgctcatgtggctgatgttattctgaggctgtgcttttacagtggcgataccgaagtaaataaatcagtgccagtagtgattttcgactatgtcaacagcaattactccgtatctatacctttgataaggtctatttagtaaaggtactctttcatatgggtagcagaccctcatatcgcgaggtctgtaaaattcgtaaaaatatgtaaagactgatttagtctcaatacaataatagaccgcatactccgtagtccggatgtccttgaccgccaactagagattgacacggatgataaaccgaatagtgattcaacggtagtatcctagtgcgacaacatggtatccattatagctcgcgtcgcaggtgccaagttccaatccaacacgttcatgacatcggtgtgtagcatttcgtagtaaaccgggatatctagcagcagcactcgcagcactcgaagcaggcgagaccagcgcagctattgtgagaatgtcagccccatttcttattctggttgagtacggctctctaggaagcttgtaagacttacattccacagcagatatcaccaccttcaccgccaccgcggagttccatcttcatggactcggggttctaagggctgattagtggtgattccagcgaataataaccgaaatacatacaggttgctgggagacgacgttggtaggagacatggcctgggtgttggagggctgttccatggccatagaggccgcattccaggtaggctcctgctcctgggtgggcttggactcgttggaagacttgaaccagccgaacatcttggatgattttgagaaaaggggatatggagaggagattcaggaggggaaggggaagataaaggggaaaggcaaataagccggggtcagccgtgtttctactgaaattaaagtcctgcctccgcgctaagaataaactgaaaactctttttccaggacaggcaaccggattatgggccggtggggtagtcgggctgaggtcggcagaagaggattaccggcttatgcgctggcttagaggctatgcttagcacagctgaaatggaaagcgaggtgacttgttcatgtgttggtttctaatttaaaatgccggtaagtaacataaaaactatataggaaacattggaagtccgtgtgaaatcggacctcgaggatggagatacaccaagcttttggtcaagctttacgacagcttggcgcatttcctttcagccctattgttctatgacgtcttcgcgttggtatggggtatctttaatatcgaattataaacatgttaatggcctcgatttataattataagtctgcatgtctactaaagtgaaattactaaattcagaaaggcagcggcgcaagcacaaacctaataactgaaaccaaataaacagtcacgctctttcgacatcacatcaactatccatgccaatattccggtgcatcttgttattctatacggagtatacaaatcaacaaaatatcaagcagacagattcttctcataatgatcagctaggccaaatgatgggcccccgagcaggatattcagctcggcctagtccaaataacgtacacgcggacagtaattgatcggcctggaaacagccagtaaagatcatagtcccaaggctggataacgttgcactcctcacccgctccatggataaagcgttccatcgtgtaatctcattgcagacaacgaacagggtgatgcccagtttgcgacggaccatggtgttcacttcttgagagattatctgggggctaccgtcacctgtgaaacacatccttcgtcagcgctaagcacccttggacggtgtcccgtcttcgcatacggtaagggctgttctcaccgccacgccgacagtaatgtgtgaaaggtaaaagttccaacatcttcggatattatgtcattttcttcaagccagaaagacatcaactatcgctgtcaattccagtcatgggttaatggttaagaaactactccgtacgtactcgggttgtaataataaatgtggaatgtattggtctccgtaatgaaactctgagtgaacgcattacccataagttggtcttatggtctagcggtcatgactgtggattttgacatcttgtttggaatcttccaccgaccccggttcgaacccgggtaagaccttttattcttttattttttttcatcacaaatgatccattctagcgtctattgtcgcacttgtctatttcaaatttagtaactttgcttcttaactatacagaatagaccttgtgaaacttatagctacaatccctgtagagttgttactttttgcacttgagcgaacattccccgtttattcttctacactcgctcatatatttcacgcctaaattagctgtatgaatctgtgtgtgcagatcatgggtttgcggaaagcacacacaaaacgctgatcgcttgcttactcttccacagaattagaaagagcgagcgacgggttaacagaacaggaaggaacgaccatcctacactaatattttctttcttctgtcttgtgaatatatttcttattaactagtcacctgacaaccaattggtcttatggtctagtggttatgactgtggattttgatatcgaatttcaaactttccatcgaccccggttcgagcccgggtaagaccttttctattttatttttttgagggtgctagtaatttgatgcctgaggtggaaggcagaataaggcgggaatctaatcctctataactagttaaagagaactgtaaataattcaatccagcgaacttatcgatagttacaatattttcggtgacatgggaagcattattttccactgtactactaattgttgtcaaggacgttgacctagaactctgaacattggtggtgatccaaggagactaacatatagtaaaacaactccggtcttcttcctatattgagggccattcgagaagaaagacgctagaggcattgtgagttacacgtgtagtgtggactgcggggctaagtatagggttgcatctatattttagtctataatttctcccgaaaatgcattagtatccaaaagataactattggtcccttcagctatcgtcgccctgctctatctttgactcgccaagtgccaaaaatgaccagtatgatggtgcgggcacgagtttctcttggggttttaatataggctacccaagatttcacgacactcaaaatccggtttgttggaagccgaggttcacagaatccttggttggagatgttgatcccccactgaggccaaagcgcggtgttagtgttacctcacttatgattggggatttatataactaaatatgtactggatatagtgcctaatgaattggagcagcctaggataaactccatgacacaatggagtgcatctaacccacgagacttgaaagatccccgcactatagaatgctcggccctagatcgtctcggccaacactgcaccgaagacaccacattggatactttataaagaggggttgtccttcgctctcgcaacccccaaccactacacaaatatacaaatatacaagatgtctatgaccattgaagactgcacccaagaccgggagggcttccctcgtccatttccggatacgcctaccaatgttttggagcagtttaaaatgaacggaaaggtggtggtcgtcacgggagctgccgatggacttggccatgcgatagcgcagggtatggccgaagccggcgctcatgttgccctgtggtataattcgtaggtttttcttcatccaatgtatgtaatcggttaaccatatcaacagaaatgacgtcgctatcgagaaagcccaggtcctagcaaaggaacatggtataaaggcatccgcctacaaggtcgatggtaggcgggcagttggagcttcatatctatagaaggcgacaaatgctaagctttatctgcagtttcggagtccaatcaagtatccgagacgattaccaaggtcgtggcagatttcggcaaaattgatgtgttcgttgccaatgcaggttagtttccgcgggttgatgtatggcagatagctgattgaaaaaggcatggcgatctccaagcctatcctggaacagactctagatgagtaccgaaagcagatgtccgtgaatggtatgaaattgttaattcggcgagataagaatgtggtattaaccaggattagttgacggcattgtgtattgtgctaaatatgctggcgaggtattcgcgcggcaaggtcgtggcaatctcatcattacctcgagtatgagtgcacacattgtcaacgtgcctactgatcagcctgtgtacaatgcgaccaaggcgtacgtcactcactttggaaaatcacttgcccgcgagtggcgggattttgcgcgggtcaacatcgtctcgccaggcttcttcgatacaaagatgggcgccggtccgttcgccctcaaggaggcataccgtatgtcgtcactaggaaggcaaggccacgtgaaagaaatcaaggcattgtatctgtacctcgccagtgatgcatcgacctttatgaccggaagcgatgtgcttattgacgggggatatgtcttgccatgagacgtttaaatcaaacgaatttgcaacgagaggatcaacacgagttggtggcaacatgcaatttacatgacggtactacgtactgatccaataataaagaattggcaatgaactattcaacgtcgggcacactccgggcacactccttgtgcccgaaggcgttttgccccgctatctattttcaggtaccgtttcaataccttttgtttgatcgcaagagcataccgagcgcagctatagcaaggtcaatctaaatcgaaccttatctcttcccgggtcagaggaacgtgctccagttcaagctgattccctaacttggaaaccaggcccggaattctgtcgggccccgggggatgggaccgtttatccgagccaacagccggtcatgtccgggagaacagtggagtagaaatgagtcaacgactcgcaatgaggcgccggggtgcagggtcagcaacggccgatcgtaccggattggcaacaggatcgaactttttccaatgccgtttcacaactggggctatcagacccgaggaatgtcttggcatggtcattggaataggcgtcaaaacacaggagaaaccggctagtcgatgccagggatgcagggtgtcgtcagctacacagcaatatcatataaaatgatataagccacctttttgaaacacggcagacgaagcggacaagacggagaaaacctgcttttggcttattggcatcatgtgattggctgggtagcggcccggttggagatctccttgatacgcacagagaaagcaagtatagagagaatataaaaggatcgaaaagaaaagaattagctgtagctgcggcgtatataggaagataatagagaaaaagaccgaatacagcagaatacagcaggctgtctccagaacatactagaatatactagaagtgacaataccgtattgaaatcggtttccccacgttctatcacggcccgaagtgacttcacattgcgatatcacctgcgatttctgcccctcctttcttcctctgcccagaccacccgttttctcttttgtattttctcttgtcatctttgttttgcttgattttctttcatagcgctgccatccggtgcagccaagtccaaaacggcataattacagcaattacaccggccattggtgtcggctcgaattcgttcccgatcgcccatcttcatctcgccatgactgatgaacgggatttttcctctgaggatgtcgcgcctagagccgacactctttctcccagagaccccacgacccctgcgttcccccggcagacctcgagccccgttgtcctcccctcccgcgaatctttcggagctggcctaacttcctcatccacacacctggggcaggtcaatgctgcgcgacggggtgttgggacacaacctaaatcgtcgatgagttcacaaggaaccggtggattaaatcaagatattatggcaaaaatgaaggcattttcgttatcccgtcaaggtgctccacagccacagactgctgcctcaacggggcagatccccatggctcaaggaggcggtgcaggcggcgcattttctggaggcatgtccccgatcgctactcgtccaaatcctcaaaattggtcctcttcctctgccgtctccgctcctggctctatgtcgcctcggcccggagggcttgcggcgaagcgcatgaagccgggtctcaagctatcggatgtcaccggtccatctaatactccaggtacagatcaaaagcagggggaacaaaatgccgagtctgcctttagcaaatactccgagttcatcgatacgaaggagggcactctcaacttcaaaaacaaagctattctacacggaggtggtgtcgaattttcgtcaggccacagcttcaagatttcattggatgaagtagatcgcttggaagagctgggcaagggtaattacggaacggtctacaaggttcgacactctcgcccgcatctacgaaagccaggccaggggttgggtggcattgttagccgtcctccaggcctcgccgaaccgactccagaatctgggtcaactcaactctccggagtggtcatggccatgaaggagattcgcttggaattggacgaagccaagtttgcacaaatcattatggagttggacattctacaccgctgtgtatctccattcatcatcgatttctacggagcctttttccaggaaggtgctgtctatatgtgtgttgagtacatggacggcggctcgatcgacaagctttacgagggcggtgttcccgagaacattctgcggaagatggctctgtcgaccatcatggggttgaaatcactgaaagaggaccataatatcattcaccgcgatgtgaagccaaccaacgtccttgtcaacagcaagggccaaatcaagatctgcgattttggtgtcagcggaaatctagtctctagtattgcgaagaccaatatcggctgtcagagttatatggcacctgaacgaatctcgggaggcggaatgcaacaatcgggagcgccgagcgccggtacatacagcgtgcaaagcgatgtctggagtttaggcttgtccgtcatcgaatgcgctatgggccgatacccatatccaccggaaacattcaacaacatcttcagccagttacacgtgagtactccgaaacagttttccaagttcaatattctaatcttgtcttttaggctatcgtccacggagatcccccaacactacccgagggcttctctgaacaagcacacgcattcgtcaaggcctgtctcgacaagaaccccaaaaaccgaccaacttacaacatgttactccgacacccttggctggcctctctcatggagccaccaaccgatgccccaccacctgagtccggctctggtgatgtctcttcatcggccatgacagaggacgaagaagtggctgagtgggtgaagaagcaaatgaaactcaaggaagatggcctgctaaagatttccgagaaaccagcacttcatgctgtcgcgctggatcaggtcggcacgggcccttccgagggtgttccactcgctccgtcgcaagatgactgagctttcggctatttcgaacattgcatcctccttttctccgggggcactttcacggcgcaggcgctgtttaccacacttgcatctctattgatttcaccaggctaatgcgccaatgctctggcgtttgggatccattggagcgtgggcagaccctcggcatggtcattacccgcgtgtgctttgagactatttggggaaatcatatacctggatctacgagcattttctgaactgcagtagagataatttgctgcgcccgcccttcatatgaccaggcgcgaagaaacacaatttcatacatgttacctgtcctgaatttccttctgtatctaccttgtaaacaatctggatttttggttttcgtagatgcagccactgtagtgtatcagtttttcaattgaaatttcattttgatgattcgctagtaatcagttcataagtacatatcgctaaaagccgtgttgaaaacagatcatatatatacatccccccgaggttcttattgctgttgaaattgaacaagaactctctcaatcggaatcccctcaagcctctccccaaacctcatccgcaatctccctcaccagactcaacttcttcttctgatcctcgagaagaagaggatacccactctcatgggtgctgaacccacactgaggactgatgcaaacccgcttgagcgcctcctccctagtctccccagacccttccgcaacaaaatcagcagcggagtaaacccgctccttcatagcctccttgtcctccaaatcgcgcaacttggtactgataattccgacgacaacattcttgttcttcggcaagaactttaacggctcaaagccaccagcccgctccgtatcatactccaagtagaaagtatcaacatccaagtcctcaaacaacttcttcgcaatgatgtcatacgacccctcggagaagtgccgtccaccaataaaattgccgcgacacagatgaatccccgtatgcatatcagccggcagcccagcaagcgaatcattgtacagcttaatataagcatccaacagatcctccaccgacccctcattatctgcatccgccgcccacccctcccggaacgcagtagagcagaaatacgccatcccaggatcgtcgaactgcacgttccgcaagccggccgcgtacagcgacgccagctcggcgcgatacaccttcgcgacgtcggcgaagtactcggcgtcgttggcgtaggcgtcggccgcgtacgcgcgcccttgcttgtaccgcatgtggaaccacgccggcgtgatcatcgtcagcttgatgttgggccattcgctctgcgggagcgacgcctgcacgagacgcagctcgtggaggttggactgcgaggccgagacgctgtgtgagagcttgctgccggcgattacggagtcgcccggcattactttgcggtccttttcgatcaggctgaccacgtctgggtggtagagtctgaacattgaggattcggcgtcttggagtcggattgttcctggtttttttgttagtgtgtttttctttgcttgggggaatatcgatagatagatagatagatatataggatagttaggtatagcccggatattagtatactacgtaccctcgaactcatcccacatcaacccccagaatcgggtgcggttgtactcgccagacgtcacggccttgaacccgagctcttgctgcatcttgacgacatcgcggacggcttcttgctcgatggcggggagtccggcggcttcggcggagactccggtgttggcgatcttctcgcgcgcctcaagtaggttagctgggcgcaggagtgagcccatctgctcggcccggaagggtggggcgcttttaagctcgttcgccatgttttttgtaggaaaagctacgcttgcaaatccaggagagttgtttggtataggattattccagggaaattttagttttagttttcaggggacatccctctcttctctatgtgggggatctttttctgcggggctgctaaaatgtggtgctaatggggcttctagtagagcggctatctgagcaccacattttagcaccacacaataagaaagatcccccacatggagaggataggaatatcccccaaaactaaaatttctaagataattatataccaaacagctcttcccgggtagcttaacgaccagaaggtcgcagttccccgagggagacagctctgaaggccatgatgtagaggatatatgcgcgggcgtacattctcccgctcggccaaaagaccattatctctcgctctgacatacccaggaccaatatatatagtagcgcacaagctattggtgacagcagtctttatataccgtagcgctcttcccgaataagagcaaaactataactgattcctagtcttcggcaaagcccgagtcgggcccagcccgtggcccgacccgtacgggcttcgggttgggtcgggcgtagagcctcaagactttgggttcgtgcccttagctactcccacttctgtatccgtggtcctatcgacaatctgtggctagagtactcacaagtcactagtacgctgaaccaaatgctggtctcagaatctggtggtcctgcaaacgtccacctccagtggggagtaatccatgatgatattcggacagagagctgtacctcatggggggtttctgtgaaagccactcagcccatcatgccgtttgaccctctcgttcgtatggctgctcagcaagagcaatatgtgttgcatccatcctctgagagtgcaaagagggctttctcgaactttgcgacgctgactgacaagacgttgaaccatctttgttgctatttataatccaaccctggctatacggtaattaggtaacgcatgacctcggagcaacaagcaagggaaaccagccagctataatgtgtatgcatagtcactttctcaccctacttgaagccagatatatgcatcacctttgatatttgaatgtatgacgcgcttctatactccactatgcctcgattgaataacaaaagagatatagttgtaaatgaagcagtgatctgtgactctaacagagccttggtagtgagtaacctctcttgtgagattgtttggacagcaaaagcggatttttgcggtagtcattcgcctgaatgaatacccccctcttgtaccaggaacatttgaatcacctccaggatcacgctgttcgttcctgggagctgctagccgtctaggagcgcccctaggggtagcctaaccgtagaagtgtagggctgtagcgaaaaaatgtgctgaaagaggaatgaaagagtcgaatatggtctaaatactcgttgctaactaggtgtgaactgctgatgtcagccgttagcttgttggcactggaatggatagaaaacaaagtaggacatttgttcacagggccaggatcggtaacaggaatggctggctcggacatagccacctttccataagtatggggtcttcaagtcatcgtgtactccgtgtaattcggtgacggtaaattacgcaaaggagtttagtatgtttacccccgtgatctgagtagtgtattccctacagaagttaaggaagaggctttctggctagccctttaagtcccgactgggacatcgaagaagtgatctcgcggatatcttgagacacaaattcttcgacttcgtcgttcaaccgcccccaaagatagaacttattgccagacaggaaaattgtgtgccatccgtaatcatcctccataaccggctgtcctggttggagaccatagtctcgagcaattacttgaccttcggagtcggcgcctatccactcttcctgataaagaggatttgatgggttcgaggtccagccagggggatcagtaaactggcaatccttagcgacgtgaccaaaaacaagagggagttagcctatacttactggtggcagagcggaggtcttcgtaggtgacttgacaggcgagaccgccacagaaggtggagtagagatcctggatggaggcattatcgcaacagtggacatggtttcaggagccggcttgtcaggattgtcagttggtgaagggattaagggcaggtctgatgtaattatgtagtttctgccaatccggaccgccaccatgtcaatacaactctctcctttctgcttcctgagcctacaacctgtagaagagagggaagcgatacgaaggggcatggccacctgagcatgctgaggtaacgactacgcgactaccttcactacgccatgataggaaggcggaggtactggcggtgaaggggggtggtcacggatctttgcggtgccactgtgcattgtatcttaggcatcaacttcactaatcaccatctcggtgctcttatcgccgttaaattcaattgattaattaacctatcgagataaaataccctaattgtattattcagctaggtaccctctttcatatatcccccttagggccgtacgaggccatatcgattctccatgtttttgagataaccaatcaataaagcttcatatattcaaacagctgctatataggcggtttcaaaaatagaaagatacgacttactacttaaatgcggcctcttcgagggtagttccttctaggaggaaagagcaaggtagcaacattaggcatactataccttcctagttgcaatgttgtttcatgttacatgccattgccggttcctttcggaagaaaagagtacaatcgattcaaggaagggaaagggaaaatgaaaacagtctacgatctcgactgggttttgtgctcttcctggcgacctcgccacaaaccatgcgaaccccgacctcgcttacggtttaggaaggaacgactcgattggcaagtgcgaggtcgaggttccaggttgggcaggtgcgcagtcggcatcagtcggcagatcgtcacatttcaaacaattcaactcccctaccagcttctcaatgagaattctaagcaaatacaccacattctgctcatgatcatggcatcggcacctgcgtcagaacaagtcctgaatgcttttaacgagattcttaacttgacaagggcttacacttatgatcgccagcaggcaagtgaatcactaacagctgcttaaattgcatgtttcaatccatcgagatcttctaaattcctgctagaccccatttggcacgatgcagtcccctattggggtctcttcgatatgctcggccttttcgtctccatcgttggagttgcgccgagcggggctataaaacgaaatttctacctcccactaacagcaatgtatgctaattggtgtaatactcttgcggcacctgttccaacgatgtataattgcacatggatagcgtatgggcccggtaaaggtacattctttcttggggcctccttaaaaggtgtccgttccccccacagcattactgggccgtggaatgaagtaatccaggaagggcgatttgccctgatcaatgatgctgccatgattgagagtggcaacacaatgaagaactgtcctgagcaaagagagaatgatacgttcattcgtttcggaaattgtgccgagacatatccattcgttcatctgttccagtaagtcaatattccagtctttaacgatactctacgacgcgaaaatttgatctaactactagataggcacagtggaaaccccgctgcagttcacggaattgcgcttcaacgtcaaggagttcttcccgcaaattacgaggatagcttgtccggcagtgtttggcaaaatgtacgaccactctgtgctaattgtcgagagctgactcagatgcggcgtggatgtgtcgccaattttgatccattggctgatgcgagcggcgcgccaccttgaccattatgttcctaagtttaagtaactaactaacggaggggagaggttaagtgacggtgtattgggacgcttaatcggaaacgacaaagctgaacggatccagtaaatcacaggtgagtctttctagggtagactgttaagttaaataagtaaatacgtaggtttggtctttctagttattactatctggtcgaccgcagaatttattcccgggtatctcaaagaccagaaggtcgcagttcctcgagggagatagctctgaaggccatgatgtaaaggatatgcctaggcgcatattcccccgctcggccaaaagatcatgatatcagagcgagagctctgacatgcccagggccaatatatatagcagcgcataagctactcgtgacagtaatatttatataccgtagcgctcttcccgaataagaggtaaaactataagctaataactgattcctaggtagtcgtcggcaaagcccgggcccaagatctcggcccgtggcccgacccgcaacccaaatggcctcatgaacgggccaaaaccaacaccttgcttggcgagaacgaaatttcagattggcgactcggagccgaagcttactatcgtggttgcctatcatgttttagcccccaatcatttaagatcctttctatgccgttatggcccgaattccattcactgctgcagctctctggcttaataaatccatatttctttgtaatatcaggtggttttggacaccattacatattcagtgttgactgtggcagtactagtagaagagaaaagagtaataggaaaagaaagaaccctattgtctaagataagtgtgtaaaagtgctgctgagtactaaataactagttaactatttaattgataatcttgtagcggtgagagagatatgtagaaggttagattcctacaaacgatcgagatctagctaaatagctaggtgaagcctggcaaaccaggcaacggcatgtgatcggcacatggccaccacaacagataataaccataactaagcattagataaagtgggtaactagccgcctcaagactttgggttcgtgcccttagctgcccccatcgacagcattctctcactctccacagccctttcaatatcacatccatatgctcgctcttcaacatattctatagcctacattcaattataacgtgtagtatttgattttcaattctacctatatatgcataagtgggttatccggaatatgcatgccgggtcctccggatcctgtacaacagtctaccctacaaagattcacccacaaccacctccacttatattttctagctcatacatagcgtggtatacaattcggtatctctgcagattcaaaatagtatatatccaagcgatggcgttctcaaccctcaattttatatagtagggcccccgagcatcactaactgcctaacatctatctggcatattataaattgacaaacgcaatggttgtagaatatagaagagagggattagacgaactcgatataatacaaaatacaagcttaatactagagatcaagattaatgggaatatgggcagagtgtgggtgaatctttctagggtagactgttgtagcgggaatccttgaatccttcctgccacctcacagcaaccatctcgatcgagattagctggacggctataagttcaggaagtgatcccctcctctcttcttttcgttgatcacttcccagcttctctcctttcctcttttctttcctaccggtcagcttctctcctttcacggaaacaaagcaaagaaaaccaccgaacccaaacgacatcatgagtgactccaatgtctgtggcaagtgtggcgcgaggcgccgtggcgaaagcaaagattttcaattctttgtcgccaaatcagtcatcgggttcatcactatgactgcatgcttcgtgctgatgagactgttcttcctaggtgctcttacgcagcctatgagtaatcagtctgatatttcgttacccgccatgggtaatcatagcgatcagctgagcggtgttgatttcacactctacgcagtcgacgcctcgatgaacgaacaggacgctatacagagctattacagtgccttcgtcaatgaaaccccacctgtccgaaaggagctggtacgactgtaactaccctggtggtggcatcggacttgcttgctgcggcacggcgcatgggattggcaactttgtctcttcagtcggctccggctcagcttcaggatacatcgttactctactcaaggaaatcaattctgccagcaggctcgatgagaagccgcgttctgcgtacatcacgcaggacagcagcaacctatgtgtgtcgtgggcgacctatgcgacgagcaagatgaccagcgctgaagagacagaaatatcaaccttctctacggagtgcgggtcaaaaggctacttttgatagccaatcctcacgacagattcctctctgcctagttcctcttgtccaagtcactcaatacatgtttcgagttttagccacaatgaaaatcgtctcaacgatgattgatctggagcgctttgaaaaaaatgcgaaaattccacacctctctacttttacagatttatcccgttgctcggcgaataccagaacatggcgccatcaaatgtgatgtggctaggttaaggaaccaataaatttattggactagcataatggaaacaagaaagcatttcatctcaagacccaatcggcattatacaaaattcctgcaatgaacaaacacataccaatgagatgaattgaaaaactgaagcaccacaggccagctcaattccaagatgaaattagccaacacaagctgtaaaatcaaagaaacttgccaataaaagaaaaaatcattatcacaatcccctcaccttacttactttttctcccctaatcctagactaccgaacaacttgtcaagtcccaatccgccaagaaggccattcaacaaaccacccagcccgagaccaccgagcagttttccgaccaaccccagaacaccgctcagcagcaagcccacagcggcaatgatttggaaaagtggctcggaaaggagggcccagagcggattcagctttttcttggcgtgaggcatgtcagctatgcgtttgcggccgttctcgatcgttttggtgactgtctcggtcagctccttgagtaggtcggcgagctggtactcttccggggtagcatcacgcgaggcagcgcgcgccttagcggtggccgcgatgcggccatcggggtcgagggcacggatagagccattacattcttggaggatacggccaccttcttccagaagaggtttaacggcttggacgagcttctcttcgtcgagctcttccttaggtgtacgctcggccttttcgatttgctgtagaattgttactactaagaaagaaatataagggggaatatgaacttgcctcagtgatctgttggcaaacaggcttaactcggtcgagggtctgactgagaatatagatcatcttctcagctatctggcggtcctgctcggctttagcctgagcctctgcctcttccgaggtaagatcctcttcttcaggctcaggttccggaatattctccagtaaggtacactcgccaatattgttgccatcgttgtcaacgacatagccgttatcgttaacggttttaccaaccagtgttgccagattaccggaagtcagtttaccaataaggttaccatccgtatcgcgtacctcaccctccttagtgatcttgcggccagacatagggttgatatcgcgctgcttctcttccggctcccagcgttcggccttaccgatagtatttccattcttatcaataacatcgccgtcctcatcgaccttacggccgaaaagaaactttgcatcgccttcgataaggcggccgataattcgaccttcgtccacaactataccgtccttaccgacctcagctttatcaaagccgtagaactgcccctccttctcttcctgctcctcatcgggtatcagccctgcccggccaactaccttaccgttatcattccagatttgaccctggccgtcgaccttacagccagcgagacgttcgccttcaatgacccgcccaaagacaacacccgtagctggatccacaatgttcccctgcttattcacaactttgtcctcaagaatagaaaggtcctcttcagcggggggttcttcctcgggtggctcataaggctcgccacggcccctgacattgccatatttatctgtaatctccccatcttcgtcgaccatttggccacgcaattttttggcaaccccctcggtaagtcggcctacaatagagccgttctcgtcctcgataaacccgtcctcagtaacaaccaggctctcgaagccggcgaacgggccatcgggaatatcttcgcgctcgtcgtcaggaataagctcagcgcgaccgacaatatttttgccttcataaatctcgccgttctcgaatatcctttttcccgccagctccttagggcagccctcaataatgcgaccgatcggaaagccctccggcccgatcacatacccggccttattgcagctcagcccttccatactggaaaggtcaataggctctacctgaggcgattcaggctcctcccaccgttctgcacgcgcgacgacgttgccatactggtcgagtatttcaccgtcctcgtccactgctctgttgaccagctttttcgcgtcgccttcaatgactcggccgaccctcgtctggttctcgtcttcgacccacccgtcctggccgacgaccaggccatctaggcccgcgaatagccctccctcttcatcatcgtagacgggtattggctgggccttgccgatcatattgccgcggttgtcccaaaactggcccgaggcgtcaagctcggcgccaagcttcgagagcttcttaggatcaccttcaattatttcgccaacaggcttgccggtagtttcatccatgatgtagccgcgcttgttgcacttcagaccctcaagagactcgattgacggtattcttttgttactctcctcggtgtcgtcgtgagcagtctgttgctgttgctgttgctgctgctgctcctccacggggaacaactccactcggcctatggcgtcgccttcatcatcgacgatctctccctcgccattgacggtatacccgacgagatcctccggatctccctcgacaatcttgcccactgccaggccagaagaattctcaatcacgccaccctcggagacaggcagcccatcgagttcatccagggtggttaccacgtccttggcctggtccagctccgagttttcctccccagaaaactccgtagattgatcaaccgtctcatccaatatatcaacacggccgatcaaatcgccatcctcgtttagaatctcgccattgtccccgacagtctggccgaccaagtcttccgagtctccctccaccacttttcccattgggttgccgttctgatcgcagatttggccacccttggcgacctcgagacccttaagcgtagaagaatcaggcgacacggtgctcgagtcagtgttctcaccctctcgcgctatatcctccacttgacccgattggctccgaaccttctcgggccgttcggacacggcgcgcccgagtggggccgcagcgccagaagcttgagaaccatcgtccttgggtggggagataggacggcgctgctcgggtgcaccaggagattcctttgtagactttgagaaaggggttgcaggcacggctgtttcttccctgtcatccgagacgggctcggattgtttggtttggagcttgcgcggacccgtttttttcttggaattgaggctcattttgacccgacgtaagggaggatctgaagaccgtttgattttcggttgtactcagtatttactttccaccaaaataggcagatgagaattgagctttaggaatatgcgatagtaaagaattccaagtgattggggttgatcctttatggtgaggttttgctgtgataaactagtttttgcaatcgaaaggcccattgtcttgcatcatagtgacaccaaacaattgtcgccaaagagttttcacctaagctgtgcatgtcatataacaagcgtaaaccgtccgatgtagccaaaatccactttatcacggcctggtttgaatccaacacgccgaaccaagcaggctatccggcgcattgaagtcgagactttgtttaaccaaggctctagatttctttttgaattgaacatcttggaagtaatacaatgacgaagttggtgaatattctagccaaactcaagcaactaagcggcatttcattgaactgcagagccccggtgacgtcggcggcaacgataactcatctgacactaccatcaccccgatgcagccattcgttgggagttcgctcttccttgacctaaatcctcaagtgaaatttggatgggcagcaaaatcttaatgtagcgtgacctggtcgtttcgattacagaatctatggtcatggtcgccaactttccgaagccctcggcctacagaatggctccctggtgatgggcagacatatttctccggagcaaagaatatctcagaaagaggaagaggaataatatcaatattctggtctctttttccacctcttacccccgaccagtcagcggcaccgaggggtagccaatcccctggcttctactttagagcaatacgttacgatttatttgacgactggttaaaggtgcgcttgttgacgctgaatattgaagattggcgtgttagccacgaaccgctttcatcggttcgatgagctctgattatttccggttattacttgttccaatactgctcattggtagtctaaagactatctataccgtttcattggatactgactgcttggtcacattctaaaatacaaactgcaatcaaccaaggatcgatatattacaccttccagcgacaaagccacggctcaatccacattgcctaataaaagatactggcacctaaaaggcgatgatgaggaagaaagctgcgctgcctgcttgctgtttggctgacgtagttgggccgacagattggatcaagatgcctattgaatgacaatgagacaaaggctttatggccgtaaggcctaccacccagttgtcacaatacataatgctcgatgctgtgagagtcgtgtgcttatatgttctcttcgcaacactcatgtgaattccaaggcaaatgagagcgaggaacgaatttgacaagattgatgcaaaagtccacagccgtctcagctggagcccggagcctagttactagtgccagtcagtaaaaatgtcacaaaacattgaattgtcaaaatgattctctgggtccccaaatgctggtagaaaagaagggctcactgacagtaaacctatagtcaaatcacctttaatcttcgcctttagttgaatctcaatatccaaattgatatccaaacgaagacgcaactgctcgtcacgcccgccgtcatctttttcctctttttgctcttccttctgtccaccacccaaggctccgccgactgccttacctgtgctgtcagtcacgccgttcatggccttatcggccgtgttttgcaccaactcgcccgcttggtccacaccacccaggcccgaaagtgcgttgctgccactgcgcttctgcggttcttgctgtggctggcggtgacgccgggtgcgttggcgctgctgaggctgagcctggggttggccatctatgtcgctgcggtggattgactcgacatcggattccggacggtatgagcgagcgggatgggatcctcgtctgcggctatgtgtctgttcaagttcgggttcaggctcgggctcggccctttcttcttgctgttcctcttgtctatttcgttcttgttctggctcttgatacgagtcggagtcttgcttggacgtggacggcttcgtttcctgcttggtgggagcttttttgcctagcttgcgcggcgcacgcttaggcttgttaggagaggtcttcgattccgagctaagggtttgaggttgggtttgttccaggtcagtcattgtggagggaagggatgaagaagaaaataagaaagaggttgaactatgagctagtcggatggatacgatttgcgttaatagtacaaacgttagtgggagtaggtttagatgaagtatgatgcacatttgtaaaatatgtgctactcatttgcactgacattactccaaccgttctatattatcgaacagaccacgggcgagatgggacaattgggttgtccgacgtcaggggtggtggcgccgtatttatcgggagaggagttggtaccagacaggtttagccaagaaaagcattgagaaaccagctgccgatattacgaccggaaagcaaaaaaaaaaagcctgcgaaggtgtatagcggccagtggccgaatgcctaatgttgcagagctgatgccttaaatgcctgatttatgccgcctataactactgtgttttgtaaacggaaggcactattgtcttaggggctaatcctgataaggcagtgtacctcttggcactctatttccagtatgcatggcattaattatagtctcgctacctcttatagcagtggtatcgccccctcccgtagaaagggcacggaggcgaccgcgagcttattcttaggatacttcgctacgctagagctaggccgggggaagatagtggataaggttagaggaagagtaagaatactcgaattggagggagatggaggtttgtatagtaagaacaactttaagatcaggaaataaataaataaacaaatatatacggtcggaatatcttcaaactaccaagacttaggcgaacagagacttacatagtaggaatagctttattttagatgctctctgtcgttgtaatccaggtatttgccagtataaaatcaggcaaaatcaggcattcgaccgctggccgctatacaccttcgcagctcctcgtgtaacgaaccaaattacatggccatcccatacagcatgccatcattgccacttttcactcagtcttttcacgtctttgaccgttcggaaccttctcattactctgcctgccttcaaccaattttcttaagctcaggtagccttttctcccgatattcctaacttctttgcaaactccgaaacagattttacacctgccgaatcccaaaagatgggatcgcttcctcaacttttcttggcacaggatgggaatcaaagcgagatccctatgccaatctcgggaaaatgaccactagcggaatttcggatctcgtcccaatggtctgcctaatagtgctagtgccagagccagaaaagcctgctagccgattatcgagcagccgattttgatattgatgataaaatatgcgtcaaatcaggaagccaacaaagtacaaatagttgggcgaaatgaggatacatgggtttacaaggccctagttaatactagcctgattgatgggagacgcaaatccagaggtaattatatcaatcgtatgactataaagacaacagtattatccatcaattttagaatccaaaaaaccaaatccacaaagttgtaagccgtccactaatagcatcaaaaataacagtctccttcactaggcgttgttgagaccaagtgggttgtcctcatcctgcttctgtcccccaacaccctggacggtaccctgcacagcctgtccagcatcctcggttgtatggccgatgccacctgtcgcaccggaggcagtatgcccgaggccttcagtggctccgccggcggtctttcccaggtcgtcgaccgtgctacccaaggtgtcggtcacgccgccaactgtcttgccgacggtatcggtcacaccgccgagggggccttctaaccaaccatagagtcagcgaatactgatattagctatatggtgttgaatttggacatactgctctcgtcagacatatcggcgattggtaggtttcgtatagattcaagaaatatgagtttgaaatgtacaggttggaaggctattgagactaggctctccgcctttatatatcggttccatccacaacaaatagataaaagccgggtttatgacacatggtatggttgggtgcaaccccaagcagcctgaaattaccaaagtatatagtgcccacaccaataacaagctaacaagtggttatagggagtcccatttgtcgtttagtacatgacagccattcgatgtagaccggttattgaaccgtgttttatccgggtctctaccagccatcgaccctactgctggtggcgctgagcaaacgattattggaactctctggttgcccttgtaattgtgtcttcgtcttgcacgccgatcagatcaaaaacaggaaaatcttcgccacaaaatatttccggtttgtgaaattcttaaatagatagggatattgataaataatcaagtatggctctatgaaaagacgaaagcagtattggatgaagggattgcttgtgacgacgtcaaattttcgttgtgcaggaattggtaatggagccaggatggttgttcatgccctgttgtcaaaaaaacaagatcaactcctattcaattttgagcagacatatttgacgggtaagaggggagggaggaggtgaggtgctttaagagcaggaaacttacaagagagacagggttatgtcaccgtgaatactggccttcagttctatctcaatatccaggtccaattccagcctcagcttcaaacccttctcatctagaatcgatttatccccctcatgggaaatctccatgccaccgccaggtttctcttttgagacttggttggtaaatggctgcatggcttggccatcgtcatcagaatagtcgtcatcgtactcatcgtactcttctgggctgttttcatccccatccatgtattcgtcgtctttctgttgttgaagaggacgcctccgttgctgcagcacttgcatattcttagtctgtggcgcttcatcctcatattcctcattggtgtagctgtcggagctgtagtagtcttcatcatcagcgtcgtcgtcctgtacggggagcttcttttgctgctctttgggcttttcactggtggccataatggatgcgatggctttgcattcgattatagagagaggaaacgtgtatatgcgaaagcagataggaaatcaaatcttgaacctgaaaaagaaaaatcaagatgtgatatgcaataatcgcacgtagggaaaacaggaggacatatcgtcgatatcaagtctatgcggtgtgcaatgacgttgccggctgtcttctactttgctccaggcccaaattactctaatgaggactttagatgtgccagctgcgctgtttatcattacattcgtggcattgcgtgttgagtatccctggatctactgaatccaggcaattgtcggttagaatacccctttcgtttggtcatccaggacgggactaaattgtactgtgtgatgggtcaactccatgcaattcctccgtgcgtttctgcctatacctttttggtcgggctggtcgctttgtatgtttgatactgactcaaccgaagaaacacggcaataccgccctctacgtcgggggcggccaaaaatgtcccatctcgcctggctatgacggcgtcctgcctggactatgcgatagaaaaagcctaaatctgcggatgacattgctaatcggtttgttattggttcccgtagacgtcatattatggctcttggtaatgacatgctgccgattagttaactttagccgacatgttaaattatgtagagttggtcattgtttctattccatgatttcgactcaaatttgtgattcaatgagcgtcggtattgcagccaaacgctagttgaacctctgatttcgatcaccctgctcgaaataactcccatacattttcctaactacatgctcatattcttctttcggtatatcagctggattgtcccctttgaaaacaatgcaaacttctatctatcaaacaatcttgctgatgcaaacaagcaaatagatggcgagtggatcgtaacagcgcgcgccacagccatttggtggggttctcaagcctaatggctaatgcaaagtgaagaattgtgcaatcgagtacctagataagggctgtaagacaaatggtacaaaatggctgtggcgagataatatagacctggtgaccccgagcttcttctacctgcattcctccaaaagtcgatattgccagcctaattcactctctttaaccctttccattcttccgctctggattagacccctcatattcgacaatatcgttttcacgctttcccacagaggctcacccgccatttctttgcaaaactccaaagttgattctgataaagtcagctaagtggtttcacccaaattggacagaggacatatgacaggagcgcaagtcggaataatatggcagtgataatgtgtcggcacaagagatgctatactcctcttcctctagccttcacggcagtgatgactggtttcgacttcacgggacaaaagttggacattgatcttgtctcgttacttttctagatttaataagtgtcctaaaccttctttggggcaactatctactcactgtttatgtagttcctacgattatagatttcagttttgtctcgattagccagagcatccactaatgctctaataggacgcagcttttatgatcctggatgatttgattcaggttgtattctcttcgctcagaagtgctgggttttcacactgtagccaaaccttaggctgtctgcactcaggtgcaagctgaatactaccggcattcaagcacctgtatattaatgatgagcttgcggtctcgctttatcggaaatctgatatgctataagagcttagagatcttaggtacttacctaagaaaaatccagatattatagttgcgtcggacgatcgactcccgttggcatctctaggtcgtggccgaggactcttcttgtcgtattcttataccgtgagactcccttatgctgtaaaatattgtgaggccctgattctattgctttgccgtgactacgatttttcttacaagacttactggttggctattctaagctatatgttagattttatcgacggtacggatatcttgaatgaaaacaagctgcaagaaggctatagaaagttttaccgtgccctcaaactagaagatcctaagatgtggtcaatactggatgagctccgactacgcttgaatgaagagcgtcgcctcccagtgatcaaagatttataaaaccgggttaatatgatctatacaactctatgtctcatactgccaaacaagaaaataataaataaaaagggatcacaggtaggccccccatatatattctgcattcgcgcgcagtgcagattgaacaccgaccgtcacaaacaacacgtgatgtcccaatagcgtagtatcaaaagcgtcctgcatagcgacagccaaaaagcctcacatcctatctccataacgaaggacaggtaaaagaaaaaaaaaataggtagcttctctttgattgagcgtgtcatccttagtgcaggggccatgctaatcttctctgtatattttcatttgaccatatgccccgaagggcgaaaagacttccttaaagttcaatataacccgcgttcgggggcagaattgtaccgcctaccggttaggtaaggcacgtgggcggtcatatacattgttatacatgcccttgctgtcggcaggttgattggacgatgtttgttgtttgctgtttgctgttcattgctatgccgagagaagatcagagaattaccggcaccaagatgacaattgagcgtattgtcagtcgcgcatgacatcgatccgggaactctgtgcgaaacaagtcttcgaatttcttgatgatgtgtttgatctcggcatcttgtattggaacgacactagtctctctcggcatagtaattgagcagtaattcacttcagatgaaagagagtgcccatggaatcagatgaaaaggatatcatcttgtagcggggcagttttgtgtgggattactcagcactgcgctatgcctgtaggtgcggggtcatccaatgtcgaacttagggcttgggaagtatagaagtcacaatatctaacacagtccctgttaaggtcaagtccttgaggattggagagattaagatgatctcaacactacgactgaatttctggttaccaagaattaagatatacttcacttccttacagcctagcccaagaacaagattaatcatataattgcttcgcttcgctccgcaataaatatcggaatcttctagtattattcacatatatatcttctttttctcttcttgaaaagcattaccgcatggtcacaagctcctcggcgctagtagggtggatagcaacacagctatcgaagtcctgcttagtagcacccatcttgatagcaacaccgaagccctgcagcatctcaccgacgccaagaccaaggatgtgcagaccgacaaccttttcctggggaccggcgcaaatgatcttcatctcggtggggttcttggccttctcctctggggacaagccgacatcgtagaacatggcagtgaacttggtgtgataaaccttaatcttgtcgtcgccgtagcgaatgcgggcctcgggctcggtgagaccgacgcagccgacctcggggtgcgagaaaacgaccgtaggaatgttctcgtaggagatcttggagtgcttcagctcgacagggccgaagagacggctgccgagttggcgaccggcagcaatggcaactacagaacacagtcagtgcatttattcagacgaaaagtggaaataacgacttaccaggggtcaactcagcttgaccggtcacgtcaccgagagcgtagataccctcaacggaggtgttctggtactcgtcaaccaagacgtgattcccaagattcagcttgacaccagggatatccaagtttaggtcttcgatctcgggggcacggcccacagcccagaggagctcgttgacctcgatctcagagccatcgtggccaatgagcttgagcaggcgatccttgcccttgccatcccgaatgagttgcacctccttgaaaccaccgtggctgcggtgaagcttgacgccggcggcctcgtagcgatcagtcatagtcttctggatcatagggtcgaacttgcgcaagaaggtctcgccgcggatgaacatgtgggtctcaacatcaacagcgttcaggacaccagcaagctcaacggcgatgtagccagcaccgacaacggcgatcttagggggaagctcttccaactcgaagaatccgtcgcttgtgataccgtgctcggcgccaggtacggcggggacgctaggccggccaccggtagccaacaagatgtggggtgcggtgtaacgggcagtaccggagccgtcggccagcttgacctcgatagtgtgaggctcgacgaagccagcacggccttggaccaggtcgattccctcgcgaccccagttgccctcgtaggcgccgttcaaccgtttaatgacggcatcgcgggtgttcttaaagtgggtgtagttcatagaaacgttattggggatgtcgtagccatagttctttgcgatgtgcaacgtctcattgatggtcgcaaagttccatgtcatcttcttagggacacatctgaatgttgtcagaaaaaaaccgtcaatcgagtagaacggcattacaccttgtactcaccccacattgacacaggtaccgccagaccgcccgctttccacgatgagggttttcttgccataccaaccagctgcgcggcgagcgcttccactgccaccactaccaccgccgaggacgatgtagtcatactgatgtgtttcgacgggagccatattggatggttgttggttctcaggggcggatgacgaagaaaagtgtcgagagattgtagagagccgagagttcgtagcaattgggttcgcaggggtgaagcgagtagagttgatggtcgccagagttcgattggtcaaacgaccaggacgaatttgtccgacagaagatcgggtcagagatgaagaggctcgaaagctaattcgggaggattggatggagcgggagagcatggagagaggggaggaggggaagagggaacaattatatacaggcttaggtgagaggggtcggaaaagacgtggtgacgatatcggggttcgttaatgcgcattggttcttccgtcaccgcggtcgatttctcagcattgattacgtgatctgatctagatccgggacttgatacttttgggatctacactttgtttacacggttaatatgtaatattattgaatttgtggattgtaggtatgggtataggaaattcagcaaagagcgacagggagtgaccagcactccacaattaaagtcgatgcagcacacaaggaaataatatcgatcagaaaatttacaactcagagccagggttgaagcactggagtaagtcaagacttgatggaaaccaacaaaggccaatgaatgttgagagatttttcagatagaaaagggccccagccctatcaatccaaagagagtaacagtaacggggaacagggtatcaaaacgcgatgaatgtaaaaaaaagccatcgagcccatgcttatatctagactccatgtcacaacatgctagagtgacatggccagtctctggggcgagggatagacggtagttggggcgtgggaggtggaagagtgtgttcgaatatttgcgtggacagagatcgtgaaggtatcttctgatgacttgcagatcacgcaatccacacaatgtcatgacatgctaccctgctggtcacattttgcatgcgacagaggggcagtcttcaatgttaaaggcagtgtgaggatcggaggagttggactcgtatgttgtattgcgagacgaggaaacaaagtaagagtgtttcggtaggaggagaggcatccccgactcaaaatccaggaccacggggatcctttcaccttcgtctgggcgctgttgaagcagaacgctatcgcaagaggacggctagtgggtataggcgataacggcaaaagagatgaggcagaagcagagaggtatgtagacagagcgttccatatcggctggagttgaggagttgcgcttcatgtttttcagtatataatagcacagtgatgtggtagtgaattcggagatctgaaaaggagggggtccgggagtatgaagagtccggggagggggtggtgttatcttcttatctgcttatgtaaccgcgttgggccctcaacaaaacgtcacctgactcaacattggatgacatttggccagtcaacaaatagaaagggggtgtcctgatgcccacagtccactattaatctgctggacacgcaaccatatttgatgatgaagccccgtgggctgttactacttagttggctgacaagtgagaacatccaagtattccacgtggtactaagcctcggcaggtcctcgattataaagtggactgggaatttccaagtttgccctttccaaggttgtgcgataatgcatctgaatcgtctatatatagacggttttcgatctcctgagcaatatataggacagcctctcctcgtcttagtgtgtcctcatactccatacaccccttgacggtccccatttgccaagggtcggtcgcatgagctcataaagggcacctagccaacctcaacagcaacgatctacattactactttgcccctagccatacttacacatttaccaaagaacagcccctgtccagcgtaatccataacactccgaaacctccacattcacggagaatgaagaatgcaaggagatactaaaccacacctcctatccaccaatgaaagcaaccatgagcggccttcatacctggccaaacaaaacacaaaccaagaacgcgccttgccggccaatggagcaaggcatctggcctctcgagttctccttcgtagtcctgattaattagacagaatcttgccctagaatagtccgggtatacatgagccgatcttcccaaacacgttctcatcacctcaatatcacgccaacgatcttctaccagctaccatatcatcaccgtcataatgcgtgtttcagccctcgccttcgctgccattctgtccctggtctcggccaaacagatcaatatgcactgtaacttcgccgaggaccacaccggcatggttcagcagccctactgctgccgtgatttggtacctgcacggggaaactcgaaggcaaatgaggcattggactgtatgtataacaatctcgggatatttagtcactgggtttgtctaacggtctacttttctaggtgatcaactggaccagcctcaactgtgtgaagatcagtctcggccggcttgctgctatactattgtgagttttgttccagtcaagttggctttcggagtttgctaatctggtttcttctatttttctcagggcccgaagaagatctgtaccggccatgttatcttccaggatgcagaggatgtttagagtgagaagggtacgaaggcacagttgaatacaatcgctttatgacttggcatttgacgttttgacgtcaataatttctcgtgaatagacatcgaacatatatcacacttcgcttctggtgcttgaatgaaatgacggtgtactataacatggcgcagtctagtaggatgtttgacaaaactttgcctattgactaaaagactggacccaggagacagcagcataggtaaatcggtcaagccgtataattaattgcatgaatcaagtaatgctagaataacgagcgccaaactccacatcccccacgcccaaggtgctatacatagtcaaccttttataaatgcagccacatcaatcggaaattaccccaagcatctcctcggtgttcctgcgaaacagacgctccgctagccccggcttggtcgcacataactgcaagcaacattcggtgaatggactgatatcgacacgagagaatcgagtgtgtggccaatcagtggcatagatgacccgattaggtgcaacagataagaactcgcgtgccatagcctgaaggtcacgcatttcatggtctttgctgagtctatacggtgcagacaccttcacatacgtgttcccagcgcgaagcagagagattaaggacgagaacccttgaaggttatagggattgaaagctggaccatcatcgtccctcgaggcgagctcggggctgccaaaatggtcgatgcagatgcgcactcctagtcgtgggatgatcgcctcgaccatcgagatcatcttgaggggaagatatatctcgataatccagtcgtggagccgggcaagcttagcatgctgaagtaaggtctcttccagctcggtcttatccatcactttccctacagactgaaggttgattctcagtccacggactccaagagtatgccattcgtttaaagtctccaatttgacggtggcagggtcaaccacgacaacccctcggccgcgcgagggcccaagtcttcgcaatgcatctaataaacatgaattgtccgtgccatagactgacggttgcacaaagacgagattctcaacacctagtccggactcgaaggcaagagcttcgggtaacgtatgtgcggtgggtttatataccgccgttgaagaaataggaaaacgctcaggttccacaacatgcatatgactatcccaggactttggaggcagtctctgcttcagcgatatacttgcggacgagacatgtgttgaacgccgttgctctaaccgggtggaaaggacatcaatcaatatcgatggaggcccatggagtatattgggtttggcctgagcagtggtcagcatcctgaatagatcccaagcaaatagagagggtaggcagagtatagaaaaaagtcaaaaatcaagccctggggaaatactcacagaagagcaactccggcaaggcgatatcaccctaagaaaagacctaggaagaaccatgctagtttcaccgctcaacgtttgtggacgttgatctaagtgcctgcactgtaggggtgctgaaataaaaagcacccatcggataatatgtatggattacgacgtgtaggcctcgtacgacccacccccctagcacccacgcttgtggccagttgcaggggaaaatcgagctcggaagttgtccgtcaaggagacgctttcaatccgtaagcagccatctgggcctgttaaatgagctgagccgtcaagcggagccaagaaagtggataggtgcggcatgatccgacattgaaaaatggggtcacttggaagtaattgtaatgcgaaaaagcaatactcacggagtagagcaacatgtagttagacaatatgcagaatatcaattatcaggtaattagtgtcctaatccttgtaaaagaggggtgaaggacaaagtacggacgttggccgaagttctatttagctcggatgccgagctcccggtcttcctctcatgtccactcccagatcacttcatttgctccccggatttatcgaatacgcccccacagctcgcttatacaatttaagggcaatgcgatggacgttaaaatggtcgaccaatccctattacgccctggtgattgctgtcattgcctgcggcgggatcccgaaaggtatgaagacccttccctgcccccaccactagactggcttatcggacaatgatttgcgataatatactggtagacatttgctgattgcgcattatccccgacaggctatgacgaaggtggctatagcgccagtgtctccctcccctccttcaagtccgactacgacctcgctaaacacccggggttcgatgataccgagctagcaaatcgaaaagcgaacatctcctccttcaacgtgctaggtgcagcacttggtgcgctgttagtccttgatctcaatgatcgacttgggcgcttggtggcgtggcgcttagcatgcgtcgtgtgggcaacggggacattgatccaggtattcgcatccggtatatatggactgctcttgtttagtcgcatatggggcgggttgggcgcgggcgctctaacggtaactgcaccactatatttaaccgaaatagcccctgctaagacgagaggtctggtggtggggttatacatggtattcctactggcctttctggctatgggtaagctttgaccctctatacatcctacattgtatacatatccggctcccaatctgattcgctgcgctttcttgcaggattctttatcaactatggtgccagggtccatatggccaccacgagaactcaataccgcctcgttcaggctgttcctttaatccctgtcggtatcgcatatggtctgtcgtacctttgccctgagactcctcggtatcttgtctcgaaacagcttcatcagaaagggctggaggttctggcacggctacggggtagggatatcgatgatcccgaaatcacaaaggagttcgcaactattgatgcacgagagcgagagcgacagacagacttagcatatgtctcccattgggctatcttcaaggagacacagatgaatccgaattacagacagcgcttctggctgctaatgaccatgcaaactattgctcagtggaccggcgggaacggcatcacatactacgtaacgagcatattccaggtacgtcaatttcaacaagcaatcatcagctataccaggcaacaaaccgctaatatatacgaaacagtacgccggcctagaaggcgactcaacgtcccttgtctcctccggcgcatacgggatagtcaaactaatcttcacaatggccttcacatggggtctaatcgacctcatcggtcgacgccgctgcaccctcgccggactaagcctgcagctgtgcgcacacatctacatgggtatatacatgggcctgcgcccaggctcggaagacaacaaagccgcctccaacgcagctgtcgcctcggtcttcgtctacgccgtcggctggtctatcggcctatgcacggtgccttacctgtacggtacggaggtcttcccaacgcgtatccgcaacgtcagttacgcgattagcatggcgctgcactggttcttccagtttgccgttgtacgagtcaccccgaatatgttcgtctcgctgcacgtctggggtgcttatctcttctgggcacttatttgcttttctgggctcatcattcttggtgtttggatgcctgagacgaagggtgtgccaatcgagcggatgggggatttgtttgacgggccatggtatctacgctggcgggctaagccgagggagtgggatcttgcttcgccgactgatacgctggagaatgtttcatcgaaggacggttgtgtcgttaagtctgccggttcggccttgtgagggtctttttcgttatttccctggcatcccattgacatatatatgctctgttttgtatatcaagaaaaagttgcaagacttataatgcagtgcaatattgcctacaccgattgacactttggaatacattcaattatcctcattggctgctgacgtgatatatctatctcggattgatcttttggcagggtactatattgtgtgtgtatttgggaatcacgagaacaaaagtcgagtaatgctatacaagatcatagaagatcagccccagccctgatcaaagacaggcgtcatattcgtcgtgattggctgcgcatacgagaatgcctcatatacctcaggcgtaatttcgtaggacccggggtcattcatcgtcattccggcatttggcatcccgcccagcaagtgcataggcggcagctggggcatttcgcccatgttcgggatgtcgaaacctgatcctgggtgctgaaaggtattgtaggctcccatcacgggcgggttttcagggtcggtgttttggacttgcgtggctatcgatgcttgcgactggtggtgacgatggcctggagagacatggcgggattggttgctgcctgctgagggggattgactgtgctgagggtggtggggatgttgatgtggggattggtgatgttgggggtgttcttgtttagtctcaggaatgggagtggggattagttcgtggatgttgatttggagtttttggagctccagggagatgaggctgagcgctgttgtgataacggggttggcgactttgactctctcaagggcgaaaatgcagaacttgagtttgtctagggttcccggtgcggcgtacttcagggcttggatctcgagcaggaaaatcgatgcggctgtatagatgctgtatgcgagagagagaacgacgtggctgtcgccgaatgtgcggcggtatagatcgaagagagataggattgatgttgctgatgccatgcactgtacaagatggttcgagtcgtacgcctcggggcgggctttaaccagctcccgagagcagaggattgggcggtggagaaggatgttaatagtatgatatagacagctagaaagggctgagttagaactgtattctaattcacgcaggattgggtacatacttcaaaatcacgatatggctcggtggtgagtatggaggaagatctaccactgccaatttcaagtagtccggaagctcatcccaccagtcactcagattcttggcttgctcctgaacacagtcaaagaactccgagtccgtactttggcggattgggtcgtatatgtggattagaatctgattcaagatttccgccagaccgcacatcttcatgaaacatgacgttgaatgcgcctgcgtcggcggatagtgagcaccgtcagtgaagctaaccccatgaggtgtccatatttcgatctcagcggtgtcatcgagaatcatgcgtggcggactaacgcgagagtgctgcatcgtcggggcccggccgaagtacaatgaaacaaccttatcccagaaataacaactccaaaatagacggttccggatttcaatatcctcatcactcaaatgagcagatcctgaatatttccggctgtcgatggagatacccaagtcgtccagcagccggaaggccatgccactgtatagccaagcttgcgtccgatttccacggccgcattcctgggcactgagaaggagtaatgtctgaatgctagggatgcccgcataaccaactttgagggagccgaacaccccagtcaatgcgcgatgggagaattgtgcaccgccgtcataggagtccagcagcgggccgacctgaggctccgctttgcaccagcgtaccgagtgcgaaagaatggcattcaataaaacgtccgagtaataagctccattgattttcatatcacctatttggggaggttagtgtcatatgttgtctgaaatgacaaggtcgaacagacgtgtaaatgcaggacggtagacaaaattccacagcggctggatccagcaccaatgcgagtcgagaagatactggaaaggctcctgcaggactgtatcagcatatgcatcccttgaacaatataatccaccaggacccataccggcatagcagccatttgctcgaatgccctctctcgccatgcgctattaacaagccgctctttgcgcccctccagttcctccgtgtaatgtgaagtcggcgtcgttccactcaccagcccactgggtagctggaacaaactagtcggcccgtgaaatgagacgcgaccgtcattttccacattgagaccctcaaatgcccgggtgagatcttcagcatcgggatcgatctttatccttggtccgctcgagctggactcagccgacgacggcgatctggtcttccgcacctcttctccctcacgactcttcgataaagcatcctccaactgcgcaaccctagcctcaagctgttttgtgtaggataaagtcggggctctatgagagagacaagagtgtcagcgactgcgacgcggcaaaggaatagaataaagaggaagggatcgactcacaagctatacacacattgctcgctacgcgcggcgcatcgcgaacacgacggactagcgccgttacatttaacctggcgagtagttagctcggaaatctcgggtttcgtccgagaggatccgcacgtaccttgcgtttacgacaggcctcgcatgagaaggcgctcttccgggggagacggggtttggaaggctctgccattcccgatttggcgttttaaactcccaactcgtggataaatacccctcaaaaggtcaaaatgaaaacaggagagaagactttgggcccctacgtggggcgcggggatagcctttttagaaaatgagatttgacataaattggggtagaagactttgattggtggaggatttggagatgaggaggcatctgggctccacgggaggttatttttatataccctagccttaggtagtatgtggtagttatgttgtacttgtacacttaatagccaaggcaattatatatcaaatgctatttgcatggtattcaattgtacacacgattcatacatcccttatttcttccctttcttgaaacctggcttgcccttacccttgcccttcttgggatccttagcagactcagcatcacccttgccctttttccacccgatattaccatcgtgtctcatctgcgcatcgtcaagacgcttcttgtccttattgctaagcttgacattgcttctcttggtattgggaccgttcaattcgacggcacccagcttgcgagaaaccttcttgtccttctcggtctcgaaccatgtccgcttcggccgcgacatgatctcgtttccgtgcttcatgaggttctcgcccttggtgaattgcatctccgcttgagagaactgcttctcggtcttctcctcttgcaaaatctcggcaacctcgtcggccatatcctcggccttttgcgcccagctgtcggcaacggcttgctcgaccacacgactgacgatcttggcgccttgggccttgcctgcgcggacggcaagcttgacgaccttgcggtcgggctcggcagcaatcgtgcacgcacgaccggagcggccggcacgggctgtacgtccaacacgatgcaggtagatctcatggctctggggagcctcgtagttaatgacggtctcaacacccttgatatcgagaccacgagatgcaacgtcggtggcgagaaggaaggcaaccttgccatctcggaagttttcgacggatttgatacgctgcatgggaggttagtggtgctgtagatataggacaagagttgttgttacatacctgttcttggctcagactaccgtgtagttctgctgccttcaagcccaataggccgaaaatgatacggacgcggtgagcttctttcttctgtcggaagaagataataacgcgctttgagtaggcctctttgcacaggtacagaaggtaaccgagacgcttgtcctcccgtccgggacggagacgcacgaactcttgaataagggtggatacagtgtgcttcttggcatcaaccatcaagcgcattgggcggttcataccaacacgaataagtttgtcaattgagtctgtcatcgtcgcggagaagagcatagtctggcgagatttgggaatcgtggtgagaatctcgttcaactcatcggcgaaaccatcctcaagcatacgatctgcctcatcaagaaccaaaatctccagggtatcgactgtgaaactgggcgagttgcgcatgtgatcaatgaaacgaccgggagtggcaatgatgacatcggggcgctttttgagcacattctcctgctcgcgaagactaaaaccaccaaccaattgacagaatgtgacgtctgtgaaggtggccagtttgacggaaacattgtaacattgaacagccaactcacgagtgggcatcagaatcacaacacgacttgtaggaaccttgcggggacggaagaggagacgttcgaggatgggaacaatgaaggcagcggtctttcctgaaccagtcaccgcactaccgacgatatccttgcccagcagagcaacgggaatcgccttgcgttggataggagtcgggtctgtaaatccaactgcggcaagacctcgaaggatgggacgggaaagattgaattcttggaaagtcatcttggccatgttggccttggtgtcgaccttttcttcgggggcaaagaacgctttgcgcttctctgcttcctcctcgtccacctcactctctacatcggactctcggtctgagcccatgtcgtcggggtgaccgacgggtgtggcgacagagtcgttatcagatgcagcatcgtcatcggaatcctcattatcatccttgtcctcgtcgtcctcctcgccttcgtccccagagccaggctcggggccctcagcatcactctcatcctcgccatccgcacccatgccgaaggcgtcgtcagccatgagctcatcgtcgttgaagtcaacaggcatttcgtcgcccgatgcagcatcgtcttcagatgcgctggcgctctcttccttctcgacagcgttctttttctgtttcttagcagcagcctcatccttcttggcctgcctccgctcaatgatatcgtcaatatcgacagctttcttgtcgccggaacgcttcttctcgttgtcatcaataccccaaccatcgaagccttcagtgacaccctggttcgcgacaccgccaacatcgaactcgaactcggggtttaagacgccgtcgtcttctgttgcatctgctgccgcatcatcgtcttcctcttcagactcgggttcagctgcgggctcggcattcttcttgttcttcttggagtttttcaattgcagcttttcctgctgcttctgcttcttgttctttggcttgactgcttcgacctcgcgcttgcgctttttgttatctgttgccggcgcattatcgtcttgcatctcgttgtcgtcatcttcttcttcgacagggggttcgttctcgtcgtcggaaagcgtgaatacgaaatcatcgtctttggcggaactccgcttcgccgattgaggagccattttgggggctggcgcaaattccagtgaagttttggtagctggatgccttccacactctctcaaacagacttaatagaaaattctagacccccaaacactgtgcaagcaactcaatctcgccgagaagaaatggatcaacatgcaaaaaaaaagttccccgggcggtgacaagaaaatttccgatgacataatcaaccgctttgagatgattgtcaacggctctactccacggctgcctggttgatgttctatcccattactacaaggctattaagaaagaaagaatcaataaaggcgtactgtctcaatcaactgctacctaaataggcattcctccctttctcattattccccccgtatgcccttccacatcgatctttttttggtgagacatccaatagattctagacacagattcatctgtctctcatttatctcattttcttttccgatttttctgtttctgtttctgtttctgtttctcttttccttccagactgtcgttctctccctgtcgccagatttcccgaagatgatctccgtccatgttctcgttcattcgcaggctcatcagaggtagttaagtatcacatgggtagcactatcctggggctgggcttgagtctggggtcggttattggtcacatatgtggccttgaggcgacgggccatgtaagtaaggtcaaaactaagaataggcgtcagtaaatgcaccaagctgaaagtgaaaacacaagatgagacccacccattgccacgctccactctcgcattctcgagtacgcccttgtccttgaagccaaagtccctctccaaccacttcttgatccaggcattctcctcagcttccgcagacgttgcaatggcgcaaaccattgatgtgaaggggtggccatagcccgcaccatactgcactgtgccggtttggtcaaactcataatcggtgctttgcttataggtcccatcaaagcaagagaggaccatatcgaccagtgcccgtccgatgtgctgattcttgttgcccttttggacgaagacatgcagttcacccatgtgcttctcagcactattgccgtgccgatggaattcgacataggcgtagccaaccacagggtcaatctggttgcggcacaagcgcaccggcggacgtcgggcagccacaacgaaggggagattgttatcccggcaaaattgaagaagctcctcaaactcattcgcctccatagattggagtttgctacccaaagctgagttttgtgcataccacttcatgatttcaaggatagaagaagtatcatactgctctgcggggcgcaggtagatgccgggtggaacgacttttgaatctggtggtagtgctagccaggcgcggtgagccgcagtgcgacgcaggtgctcttgttgttcctgctctttctttattcgtctttggttgaccttccccaggttgtagacatagccttccgatgtctcgtgccaatgaaggcgtgtctgctcgtctttcatgttcctgggggtggggatatgcttgatgtcagacagaatcatagaatgctgcccatcggggatcgcggttccgtcaaagaaggcaacatgaaagatatcaacccgacttcctgccggaagctggtcccaccagctgcgaaactgctctctgacactcgcgttaggaagatcaaacgatgaaatcctgtgtctgagttctcgccattgattatctgcttcttgggtgtcccaagtgcagtcatcaggaagagttcgatcaggctcgtaaacagcttcgttgcattctgatgtgagcgtgaggattccatcctggacaattgggaagatacggcgagattttccgtatgccttggcttgaattttctgctggacattacgctgggtccgaatgtccacattgttggacgatttggccttcttttcgattcctccaagttcatcattaggaatgaactcgggtgggtcagctgcccatggctcaggttcctgaacaccttcggcattcctgggctttgcgagcaacttatagacactgctgctcatatcggccccaggtccatccctcgctgcgggaagcatctcagggcaagagtgactgtcgttgtccatgccgaagagaggctgctgcacaggcattttctttctcctgcgtttgtcaaactgtttggacaaatcccaagtctgtgcccagctcagattgtctaagctctgtatcagcttgtttctccccgtctcatccatggattcaaaagcctcaagcatagctgaactagaggaatttgagagcactgtcgattttggcttgttgggtttctcaggcgacttccgagaggcagcatttctatcccggaatggcatagatatttcaacctcctctgccatatcgatatgaataagagtttctggtagatgttgagtcagccgggattctagaacatcactcataccgcttctttggtttgttcggcacgtgtgtcacctgggggtggcattgtgtttgttactcaaagagtgcgacataaaatgttcggtaacaagcatacctgagtaatgggatgtactgtagtcacgagactgcagagcacgttctgtattgcgaatatgctgactgagaagaataaatgattgaagtgatgaaaggcggagaggcagacggagaggcaggcggagagatgaagatgggaggatgagagtggaataggcgaagaaggagagtgagggagaggaaggagggagggggtggttattacggcagctcgtccatgaaatgccagacactttgggcaatatcaagcatgtcgctgtgtgacatgacgaaatctgtttcgctgttcctcttcgcgcggaggtaacattcctggaatggaatttggattgatcccgaaatttggtggtcctcagaatcgtgatttcggtttcgaacgatccacatcttgtgaacggacttgacggaattcccttcgactgcccatttctcaatggtgatagtccccctctcagtagttcttatagtcaacatgacttggacttgctggtttgactcatggaaccagaacgaagcatcttccttcaatttcttgaatgtttcagaccaccctgcctccacaaccaccgttggccattttacatctctgttaggtgggtaaccttgaggcctccaggtacaacctggtttcttcgcccttgtggtcccctcgacactcccgccgggtaccagacgactctcctgggccctatgccaagaagcgaatatctcaaggaaagtaccccatgaggtctcgtgtatagaagaaaccgtcaccctgaggataagagtctgggaggagaagtaataactcaagaatgctttttgaagtagcctgtctgcagacttattgtcgaaatcttcccggaaggcacgcctatctacgtgatcaaatataatatatgatgactggcctttcctataacgctttgattcaagttcaaggcatctaacacattgctctgcatcttgatacctgtatcttggtgttgtagcaggaaggccttcatttcttaagatatcttccgccatgatgattgcggagcgaagcgaagcaattataaatccgtagttggttgttgaaactgatgggagcgatgaaatatatggcaatcttggaagcatgacggtcaatgacgtgattaggaaacgtagccctagaggtagattgccaggtagtatacaagacctctacaatcgtatcaacttgccttccatgtcaagattctttaaaaactagtacaaaggacaccaaaaaagacatacaatggttatgaaccatgtgatatacaacttgggggtatcataccaattacggtagacatacctaaagtattcgctactgatatgtggcggtctcgcatcaaatccaacatcccttaaaagcggtctttaccaatggttaccgagaatacctgtttagcgtgtagctggtccccaacacgtcaagacgcaggtccaatacagtgcctattgaaaccatcaaatatagggggaaatacaccagcatgatattcagataaatgtatttaaatataaagtcactttgtagtaacgggaaggaacataatatcggccgatccataaacacgtcaaaccccatcttgagcctggcaagatttttccctttccaactctctcaaaaaaataccctgcggtatattttcgcagccatgttgtccatacttcggaaagcccgcttaaaggataaagaaatgcggatattgatgctgtatgaactctgatcgggtcgttcaggccgagatgctaatgattgcaggggtcttgataatgccggcaagacgaccatcgtcaagcgaattatgaaagaggatgttacgacggttagcccgactctaggatttatcatcaagacaattgactttatggggtaatttcgatcttgttaatatcgcgagctctgctaactcgccgcagatacaaactcaacatatgtgagcttaccgggtctctggtggggactgcgtactgacaacactaggggatgttggaggacaaaaaaccctccgatcatactggaaaaactactttgaaaagaccgacacgctagtatgggttgtcgatgccacagatcgactccgggttgacgattgtcgacaggagctctcgggtctgcttcttgaagaggtacggatgacgtttccaccccaacccgcaaatcttaagagtgtcaactgaacccattctaccagcgccttacgggagctagtctattggtgttcttgaataagacagatgtggaacattgcatgggcgagcaggaggttcgagaagtaggtctaaattcctcctttgaatttcatgccgtttgccggaggctaatgtctctgcagcgtctcaaattggattcaatcaaaacacacaagtggactatcttgccatgcagtgcaatgacgggcatgaatttgaatgaaggtctagaatgggtggtacaagatgccaaggaccgactgttcctttactagtgaacaggggaaatcggcgtgtttcctcttgatatccacgctaataagatatttaatagttattttaagtgatcttattaagtttttagatcgatctattcatatatctggccaacccgtgttgtttcccctgttatatctgaactaacgttcggtcgtattctaaaaatctccaatgcggtgcattttatgttctaaagaaatagcctagtacatgttaaattgtaaaagaaccaggctgcccatatctgataggctagagtcaaagaatagaaagacaagagttgaaaagtaacaagtgtctcctttcatggattctgtacggagcgcggagtacaacctaacgttatgcaaggcacaaactgatatatataaccataccaaaatagccacatatgacccaaccgtgacccaaccgtgacccaacctatccctttaacccctgaaaagaagaaaaccaaaagaaccagggaaaaacgagggaaaagccatggaaagagaaaactgcggggcccaatcgctccacataaataatgggagtaaacaaactcctatgtgtgacggattcaggtttggtcggtatagacgcatctatccatgtctatagtctagaaaaaataataggattgtagcaaaacagcaggataaatagattaaaaagatccatgaaaaagtgatgtgtgagccaatgaattggttgatcatcgccagtcccgatttaatttaaacagggcggagaacacagcccttcttccaccctacaactcttcccccctcatttgtttcgtttgaggaggcgtgcatgaacgccgagagtcttacatcatggctgctcccaccgagagttccgaggatgtcaatgatttccttgagcgcatccgggaactaggcgaccgccgtgacaaggaagacgacgagcggaccaagaaactagaggaggagatcctgcagggccggaaggaaaggcaagcccggagagctggtatatactccttcccttgatgcacgcaatttctgcactgtcacggcatctgctgcaggtcaacaatgtgctgatatctggatgactcaaaaaacagagcgtgcacgatcactcgccctcaccgacgattcatccaccctcaatatcgcacgactgagcacttcatctatcagcacacggtcgatcgaccctccggaactccttgagccaacactgaaaacaccgcaaaccccaggacccgagccaccgatcccgagcgtggattcgagtcaagacatggagccctccgatgccgacaagcggcggggatcaatcccggatctcggattggatctcggattggattctccctcgcggacacgactacccatgtctcgcaaccgcgcagggactttgtcatggcagcaacgcccctcctcacgggacttcggcatgtcacccgcttcaacatccccaactcgctccccaactcgtgcaagccacctgagaaatttgtctacggcatcggatgagaatacactgtctcaactccaattcggattcccgcagcccgggaaggatgcccctgtgctccctccatcaccggaccgcggggctgaatcggtagcacacagcgagaaagaggaacagatggatagccaaacagacgtgattgtggagcatcaagagcccgaggtggttgaagacccaaatcccgaactagatcaacaggaagcagtagaagagacatcaccgtcgcccccgaggactggttctcgtgatagcaacatgagccatcgcttctctgtatcgtcggtttcagccactggactggggtcgccagtgcacctgtcagagactacgaagctcgagcctcgacagaatgattcctcgttggaggagtccatgtcgccgtctcctacccagcggcggatgtcaccagagcgaacacggtcgacctcacccaccaagggcctgggaggctttgttcagagtgctatgatgagaagatcagatagtgtgtcaaaaaggtggagtgcacaaactccacaggggcttgggcggtcaaattccattgtgtcaaaccgcagcagtgtggctggtccaagtttgagtgaaatgacccctccaactcttggacgaatcaaccgtgactctacaactctcctacaaagaccaggctccagccacagcgaggcagccaccgagacacccgaacgaccaaccacagcggataaagacactgtgaattttgacagcccaggaaaatcattccgacctggtcactctcgctctgctagctctgccaccgcagaaggcagtgaatctcaaagtccgtttgtctcgaaaacaatggaccccaggcgctggagccccaacaaggcttcttggttggagagtgccctcaaccgacccgagctaccacgacaaaccagcagacccccctcgcagcccaactgggccaaagaccgacagtcgaaaggtagcgtggatttgggacgagtcaacaatttcaaggaagtcacccctctcggtttgatgcgaacacctccgccaggaactcatacaaaactgcctggtctctctgttccatcgcttccaacaagccctatcaaagatggtgttccagagtctccaataggattccctctgaagaagattggtatccctagtccatcggttcctacgacccctatcaaggatcctgagtctccaataggatttcctctgaagaaagttggtgtctcaggctcatctcttcacaggaactccgtctcagatcctccctcggaattccctttcaagaagtccggtaccgctggaggatcagttagcggaagccctgaaggcaagctcaaagatgcagcacccgagtctcccttgggattccccttgaaaaagcccctcagtgcgggttcatcacttcacagaaactccgtctcagatcctccttcggaatttcctttcaagaaatccggcacccctggagggtcagtcagtggaagccccgaaggcaagctcagagatgcagtacccgagtctcccttgggattccctctcaagaagcccctcagtgcgggttcatcacttcataggaattccatctcagatcctccctcggaattcccactcaagaggcccagtgtctctggtcactcagtttctggaagcattgctaccgttcctgaatctccgtcggagttttcatccaagaaacacagtatctctggttcctcaatccctggaacccccgatggcaaatcgaaggagatagttccacaatctccgtcagttctcggtggccctgacgctggacaaacagaagaggaaaccccagcttctccatcgcctgtcgaggaacctctcaatgccctgtcaagcgatgcaccaacggaggaacccaagtctgcttctcccgctgaaactgagaatgagtcgcaagaactacctgcatctgaagagtccgagcctcaatctactcccactcgcagggaccctcccgactctttgagccccaaaccaaacttttccatctctacttcttcgcgggtgcccatttcacccatggtgaagccacagtctcccgtgctggacttccgagcaaacctgcggaaacgagaagtcgtcaaagacaacggagaagacaaagaaccagaatttaaaaatgtatttggacgcctcaaaaagactgaacctcgcagctacgttccccctgatgcgctcaagggcaatatcctactaggcaaagctgcgctgaataacaccggcggaccaaagaagaccgagcgagttgatgaatttaggaagagccttgtggtgcgcaaagatgaaatgaaagccggcgggggctccatcagacggaatacagctggagagcaggatgcgccaccaagacagactgagttcgtaccagaagcaattgctatgcgacaaaatatgacccgggcaaacagcatcaagcagccacttgtgggtgagccggtatcgcctactaaaagctttgcttctcgaatttcgcaggacagaccattgtcgtccccgaagtcatctatcaaaggcatcggttcatcgcgagcttctcaggaacaacaaccattgtcgccatatgctgccgatgatgagccgacatctcccgctaaaagctttgcttctcgtgcttcggacaaaccattgtcgtccccgaattcatctttcaagggaatagtttcatcgcgagcttctcgggaacaacaaccgttgtcgccattccctgctaatgatgagccgggctggcccttgaaagacaccagttcctcgcgtacatctcaacaatcacagccgttctcaccgttccctgccgatgatcccagcgatgagccagaggagacaatccccgcggcgagcgactacaagcaaacccccgaggtggtatcttcagtgaaacaggaggaaaccccaaaagccgttgcaccgattgagcctagcatagtgaagatgcaggaaccctcagtcaggacactccgcccagttcgtcaatggccaccggcacctgttgcagaggctactgcgactccaactctagcacctaaaagcaaattggcgggccgaatcaaccctgcgctagctggcctactttctcgtggcgcgcctgccggtgacggaccgaagaagcaactggcaacccctgtctcagcgccgagtaaccctgcctcgccatctgcgcctctcacgcacgtcacaaagggtcgtgccagaggcccgaagagacgacttccccagacaattgatgtctcgaccccgcccgctcggaatgctattaaggaggttggtgctatttcctatgaagccaccccgccagagactcctacaatccctgttgagtccttggacatcgattcggagtacctgtcgcagtctgatgaagacccagttcctgacatcaaaaccccccgtgcagacagcgcagtcaccgagcaatttccggaggtaaacactcctccccaggatacccttgaacgcgatacgcccacacccgaaagtaatttccagcgcgctctccagaccccttccctaacaacgaatttcgacatgtttccctccgccaatcttgaggcgacacccagggaacccgaaagccctggagaggtgagtccatctagcggaccacccgtcccgccgaagtttgattctcccgtctcccccttgcctgtaacgacaaagacacaatggggccagcaaaaccggtttacgtcctcatcaccgtacgctctcctaacaagccagaaagtgaaccaaatagaatcacctatgagtcaggagaagagcatccccgatgttaccgtcgagtcatcacgcagttccgtctcacggcccttgagccatccctccccgccagtacctcctaaagacgatgatgttatgctccataagccacccaatccgcgcagactttcaagaaagatgtccgctccatcactagtggcgcaagctagtgaggcacgtgaggtaattgcgggcttcttcaagacaatccctaacgctcgaaaccgcatggacattgatccccagctgatggtaatgcgtaagccggatgatgttaagatcaggaccgtgaagctacatatctgggagctcacaggtgatgggaggcgtcaggaacttccttcccacctggagtacattctataccaaggcagcatgtatctctgcgtgcatacattcgagaccgaacgaggcaacgtttcggaagtatacctttggcgtggagacgatgtccccgacgcctcggtggataatgaacagccgttcgcacgcaaagtcgctcgtgaaaatagctccaagttgcaaataattcgacaaggcaatgagcccaggcggttcatccaagcgcttggtggcattatgatcacgcgtcggggatccagctcccgccacaattcatcggctctttacatgctttgtggtcggaaacacttgggcgagatgaccttcgatgaagtggattactcgctgcgcaatctctgctctggtttcccttacgttgtctctgctccgtttggcaagctctacctatggaagggcaaaggtagtggccctgaagagaccggtgcagcccgacttatcggcatggacctaggtctgaccggagagtttgaagaagtcaccgagggtgaagaacccgacgatttcttcgatgtcttcgcagggcccagggaggccgcaccgcacatgtgccaggattactggaagctcaagccgaagtacaaccacttcggcatgcgtctcctccgcgtcgaccacgaagtgaacccgccaactcgtttctggaatatccgccgtccgggcgcaggtgcaccagtggttaatgccaacgattgcgttcaagaaatagagccattctgctaccgagacattgtcgagaaagatgtttacgttctggacaccttctttgagatctacgtgtaagtaccaccgtacgacaatgccctccactcgactgatgctaattccctcacagtattgttggcgagcaagcctcacagaagtctgccgatttcgcctcggcggtggtcttcgcgcatgaatatggtattcttgccacatccctccaggaccgaccattcatccccaagagttacgtggccctcggcggcatccccgaccgctgccaaagcgcattccgcaaatggaacccacgtgcccagcatgcgcctttcgtgttctctctggatgttgttatcgaggcgattcgatcaccagaggagaattgagtgatatcttgcgttttttatctgatttttgggggggcttctgctttgaatttgtgcatatttcggtttgtacaggctttacagagcatttcggagtcctgtgtacttgtgccatatttgcgccatagagggaactggagcatctggggactgttgggatgtagatagggggatttcgcatttgatggtgtatttaggcatttttagcaattcaagtttcataccgaggctgcctattacctaggcttttcttatcttttgagattacatatacaacacagaaattaaaacataaacatctgaatcctcgggcaatttaggatattcaagataatccatggatgcaatggttatggacgggaacggaaaaccgatcggagataaaaaaaaaatcatccgatctggaatgtcgccatcctcgatctttcgatcgttcgatcggacttgtgaataatttctccattcttacatgctactcttcctcatggcaatgtaaatattcgagtcatggacccctccatccttcgcgagctctcgaagctcgaccccgcgctacccttccgcgcatcgaccgatcatttgcatcacacatgggccaagacattcttttcgcgcccggagttgtacattcgtccacaaaccattccagagatccaacagctagtgactctcgcccgtcgctgtcgtcgccgcatcgtaacagtcggcagcggccactcgccctccgatctgacctgcacctcgtcctggctcgtcaacctcgacgacttcaatcgcatcctccacgttgacccgtcaaccggctcggtaaccgtcgaagcggggatacgattgcacgcgctgggaagagaactagacaaacatggcttgacactcgagaacctcggcagcatcgacagccagtccatagcaggcgtcatcgccactggcacccacggcagctcccttcgccacggcctggtgtcagaatgcatcgactcgctcggcctggtacttgccaatggccagcacgtccgctgcagcccgacaaataacccagacctgtttcgcgcggggctggtatcgctcggggcgcttgggatcgtcgtcgaggtcaccttcaaggcggcgcccacgttcaagatcgcttggcgccaggagcggtattcgctcgctcgcgtgatggatgaatggtcgatgggtctgtggacatcgcgtgagtttgtgcgcgtgtggtggatgccttatgagaaaggcgctgttgtctggcgtgctgataaaaccgacctcccgctgcgcgctccgccgaaaaccttctacggcgactcgatcggctaccacatctaccataacctcctcgcgctgtccttgtacgtcccgcgcatcctgccgtgggtcgaatggtttgtctttggtatgcagtacggcttccgggccgggtcggtcgtcaccgaggccgttgagcccgcgcgcgagggattgttgatgaactgtctgtattcgcagtttgttaacgaatgggctctcccgctggaaaagggtcccgaggccatcggtaggctttccgcctggctgcacggcgacatggagaccgcgcgcatccccttctcatccaagggactgtacgtgcactgtccggtcgaagtgcgagtctcggacacctcgctgaacaccaagccccgcccattcctggacccgacgtgtcacgacggcccgacgctctacctcaacgcaacgctttatcgtccctacctccgcgacccgccgtgtaaagaacgctactacgaagccttcgaatggctgatgcgagagatgggtgggaagccacactgggcgaagaacttccacacaaactcacacgagctgggcgcctcgtacgggtcagacatggagtcgtggattaaagtgcgttcggaggtcgatgctgacgggatgttcgtgggcgaatggcatcggcgtcacctgcccctggaactcgggcaggcaagcgcagcacctgcaggcgagcggctgcccctcctcgagcgcgagcacgaacgtcgcagggtagacattaatggcgtcggcgatggcgtcgaatgggtaggggatcgccgatggcaggctcaggctcagcgacaaccttttgatgcgctggatatggagaagagcctgtatccattaccgccagatcactctcctagtccgcctgggacggcgagcagcgaggagagctttgatttgcttgccaggggtgaagcgagcatattgctccccgacggaccgggggtgtgagaggagagaaatcaggctccggtcgaaagcaaacaatctcttgttgtcgggtgcgcgagtcctgattattccgttgcttttgcatctgctgatctatcggtgattgttctgactggtccattcccgggctgtgttgtggcttattggggtgcttattggctctacgggctaatttggtgattatccccgtcactttcgtttttttttcctcttttttctttttcccctccccctttgttcgaagcaatttggggatgataaattacaattggttggcaaatctgacatccgaggatgttcaggcttcgaatcctccaactgtttccccaaaaatgagggctttttttagatctccttcctatatggaacattacatggaacatatagagggatattacatattgcatactgcatattcccctgcttttacccttgttttgcttttttcaccccccattttccatttgccaaggctaaaccagagaaatcgtatggcctcgtggtctctaacttgaaatttgaatctgtcggtgaacgagtctgcatgtttgatgcaggtgcccataagctcttcgatagggcgaggtttgtctgcttttttgcttttgaaaatatgcatacaacatacagcagtcaatagttgttccattcttgtacacactgtggccaatttacgcagaatagattatcttgtttctatggatcggggaggaaagaatcacactgtgctgtgtgtgtccgtgtcttgtccttgtccctttcccttgtcccctgttccctgtcttgtcacagctgagagaccttgagatagtccatgtatagagtacccaacaaacctttcttacacattgcacaggtctatacaggtccattgatttcattgcactccatggtctagacaaccggcaaaccggggattcaggattgatatttatctgcttgatatgagggatgagggaaaggaagagagagtacagatgtactttgtagatcagtgataccctgtatggtattgcagctcgagctgagcactgtgctgcctggtatgtatacttagtatacctcacacattacactgccaccgtacaaacgagagatcaatgcaaagatctagcctagacaactgttcagattagggctggatctgatcattgcacacttgattctgtgcgagaatgcaggcagtaccagggtaatattgtacgaagatagaggcatcaagacagaacagccctaatcggatacataatcaggggaatatcaccccgctttgtatcagaaatactcttccttgtccatcagcctctttaactctttttctttcggaggctgagagcctaacagttgattgtcgctatcatgttcgcatattggcatattctggcatatcatgttgtaccacgtttcggtgcagctggcaaggatgtctatatgtccgatgctttttttcaccgacttctttttatctcgcattgacccctccatagctgcagattgactaggtaattgattggatctttcttctcatcgcaaatgactcggagttggcctttctcattctccaggcacgtgtgttggggatctctctctgacgtgcagtgtcagccttcgaggggaaaatatcgtgtgacaaggaacgttacctctctctgtcgtttcctgcccaatgactgggatcaaatctcacggactcacggctgggactgtgtcattgtactggtctctgggtatcctaagcagtcgcctaaatgtctacggtctacctgcttgccctgggattcaaaccacatgtcaccaccctcgtcaccctcgaacgctttgaacagtctctccacgtcacggcttagctgctgatgcgggggacgacgtctctgcacctttgataatcatgatatcaacctttggcgctggcggctgaatgccggtttcattatcatccaccccacctgctcgattcttttctttttctctgtttttcttttttatttgggtcaaagctctctctccctctcttctcaatcttgagatcttgctctttcttcttctttctttctccacccttcctcttgcattgcaatatctacctcccttgcttggtttccggtggagtttccaatatgatacaatccatgtcgtggcagccaaagcttcgccccaagggtttcccgcatagcattgatggctttgctgcggtggcttcgttgtcggagctggagcatcgggcccggactgaggacaagcgggaccaacgcgtcttccgggtcaagcgtaagcatgttttgaaagcctgtgatcgctgtcgcgtgaagaagaccaaggtatgtcaatacaccaggagaccttgatttgcctaatcttgttagtgtgatgggaagcagccttgcaatcgctgctcggtatacaaccacccttgtctattccgcgaaagaaaggccactcagaccaaagtatactctcgagggtgagtacatgcagagaatctcaagccagacatttcctcaagctcatagacaaaccatgcacagattcgtcgaaatgctcgaatcccaccattccctagtggtaaaggcccttcagaagctctataaattctgcgtcaacaacgaaggcttcccaggcgatcccctcgccgaagccccagacggacaccccctaacacatgcaatcctcgaccgtctggggctaatcaaacaagccgaagaaaacgccgacgagccagacgaggactcagaggatctgcgctacctacgactgctatcaacatccaccgaatgcagcgtcacagcagagccctcgccagagccagcaacacccccagagccctcacccatctctcgccctaccgcaattcccacaccagtctccatccctaaccgcacccccaccaccacaagctggcagtgggatccccagcccgttcaccagacgagctacagctacccagacgcagggtaccacgacttgatggtgatgcagcaacggtcgtccatgagtgcaccggacatgggcgctgatattgcgcatgttggtctgccctctgggccttcaggtctaccacatattccgcaacatgcgcacctcgagccgccgttcccgtatgtcctggatggatgctgcgattccggcaccccccagcatgatgtcaagcccgtgctgtcgaggctaccgtccggtctcatggctgagtctcattcgcatccgcaccatcttgggaatctctcggtggagatgatgggggactacaatttccagcatgacccggcgtattatcctgggtttacacccggctggaattttccttctggttaaatctgttttggtatttgctggactgtttctcttgtcttttggagatacatggtctttgtttatgatttgggttttttggtacaagctgttgagcagctagtttcatttcacttcttatctatatttcacattctcttttctatttctcgtcattatgatttgcattcttcttgagctcttttctttctctttttctcactctatacccccctcatctgaatttgaacaccaccggagcatggagcacgatatgtccggcacattgagccctaatccttttggccagtcctttttttccttctcgggctcagccaggtctttctttggatcgtcattattgatcttgatttggatttcctttgattctggtatctagtttgaaagagtatcaccctatcaatttaggtcctatatgcctttggtcttttcattttcctcttaccgctagcgctcgcgttagtccttgggtagaccctgtctttgtatagaatgggttaggggtggttacttacaatgagatatggattagcatagtatcatacctttgacagatagacattctccgacttggggttatacttcccagccacggccatattcaaacaataccaacgacgacgcccacaaatcctgcacataacacatgatacatacatcccacccaaccagtccaacatccccaacaaaagataacacaagaatagaaaatcggctcacaccagatctagatctcgcaccaggtcatatggtcgtacaatgcacgacctgacacagattcatctagcatcaacttggaaaagaaagacagccgcagagatctgaaaatagttaggagcggcagatcagatcgtatcggatcgtattcgcggcaagtgcgtctgtcgtctttccttccctgtttgggctggaggactggggagggagggctaggactaggctgcgtgcgggaaggttgtttgtgggacttgagaacatgctttgtcgggggttgctgcttgctggggttgtttgtgtaccctggttttgtacggagtacattggtggatatactaagatcgatgtagatgtaggtgatcttccgatatatatatctaagaaagggagatgcagtgtgatataggacagagaatgacattagacattgcaatataaaatatatatcgcatcatgctctcgtcctatcatgcctggtggaaatatgttattttcttgtaatccatttggttggttttgcctatacctcctccctcgcactctcccggtgtttgtttaatggagacctattcactcttgccacttccacatgtgttttgtaagacacactgcaactacggcgcttccggggatgtgcccgaaattcaacatctccggccaagggtttgccgactcgatttgtaggaaatcgaaatcgccgaagacttgccgacgcctcgctcttaacataatcacgagataaatggcctgtaaatctccagatcgccatcgtggttctatctctttgaacccatgtccccttccgcttccgggatctttcaaccagtatgaatgtgattactacctctgcagtaccctttgaagtaccctttgctaatcctggagccgtatatgcatatatagacaggatagtatcggccggggtccaatcggctgccgctctacttagtgaggcccaggaggacttagtgaccagattagggatgtgggtcagtaggtaatggatcagacaccaatcaggaccgctctgtgttgcttagtaataatttagtatttatttttcagagggcgatcagtcacgtggtcctggtcaaggtaccatatataagccccagcagcagcttggaggtttacacctcctatgaagtccacactcttctttcaacagtatccttcacactgtctacaaaatacaagtgaaatacttcttggatataggtgcgaaacacattcaaatgaacgactcggaaatatccagttaacacaccaatacttgatccagcacatcaagcgtgttgcaatatgatatctagcaatatgaaaaccgaagacagcggcagctctgtccctccaactcctcctcctacccctgctcccagacaccaggctctatcatggagaggttttgcagagacatttgtgattaactttgtgacttccatggctgccaccaataccagaaacgtcgtcttcaagtccgacaatccttaccttctgtgtgggatttatgcatgttttcttacgttgtttacttttctgtatcggaaattccaggctctttacttgcggatggataagtgaacctgggatcaaggatgagagcttactcatagcataagctagctacgtattatttcgactgcctggctccatgttgcatcaggattggcctctaatcgactcggaatatgatcggaggatgagctggctggatcaggagcaggatacgcgagcaaaagcccgtaaagcgacatgtcgacccacagaaaggatcgggatcagagtcctaagtggggagggaagagggggatcttcattcttccagaaaacttgtcagtatccctgtctaatttgaggcgaagtgataaaagccgtaactagttagccattcaagacacatacaacatagacgggtggatcttggtatctaatagccatcgacttgagggttggttcaaggcatgagctaggtacaacgcgaattacttagcaatcccacacccatccatcgctaactaagctttcttgccaatccgattcaaccgaagcagcctaggcttcctcggccttatctgacgtgacgtgaaattggcgacagatctacaagatactctgaatcgtttgttcgcacgtctttaacagccaatcgtctttggtatcggcttttcccaccatattcactcaagtgatgtggtttttttacatccattcctcggtgatgtagaccaatggcaaaagcaccgcatgcgaagggtagttggggtcaggtatttctctctcttcttcttcttcctcgactggacagcttcttgaagatggggttctttggaccggatgaagagtttatcgaggttatgctttaaagttgttgtgcctaatgacattcggaatttcctataggattagaatccagacgaacgcttttaatttgacatggtaggttttatcggagatagacatggactagtcggccagtgtattttcaaaaaaaaattaatacatttattcaatccagactctattttaaatctgaaagtagccctgttgaatcactgtaccgcgatgatcaggaggacccggactgacaccaaccattacccagaggagtaacgagttcgtagacagcgaggttgaatgacatcgccacacccaagtccctccataattacccgatgaataagaaaattcgaattcgacaccagaaaacgccttggtggcaacaggcctaagcccagggctagggcagcgcaacgccgagggccagggttcagatcaaagaccagtgttacacatacacatcacacaagctacgctgtgagtacaatcgatcaatcaatgcatgagaaaggaatcaatcctcgtcttccgtctctgtgttggtgtcgctggtatcgcctgcgtcgccgtcggtatcactctcgctggagtcgtcggaatctttggtcttcttcttaggcgcttggccggtcttgatcgcttgcatttggccggcgatggagtctagggagggttagtataagcgaaacaggtagtttagtggtttgggaagacttaccctcgtctggctcgctaatgtcgtcttcctcttgcacggcggctgccttggcaggatcgtcaatgtgcaggatgatttgagccgtgttgtcaagacccagatagctgtcacagatcatgtggaggaggaaggagaagtcgccgacctgtgggggagcctggaactgcatcttgagagtctggacgttgaaggtgggcttgccggcctcgtcgaagatcggcttgtcgaatgtcgtaaatgtgaacggcggtacggccatcttgccctgcttgccgtctgctaggaagatgttccagcgaggggagtgatcgcgcgctaggtacggtgcgttggccagaggcggctggatgctttcaatctttgcctcaaccttcttaccgtcctccatcttagtggcgctgttcttggctggcttgcgacccatcagggcttccaggtcgtcctcgtcggggtcaatgtcctctaggtcgagcgggttcactggcggcacggatgtgctgcctggcgggatgaagcgggctttgactaccagctgtaccagactgctgggtgtgatcaccttttctcccataaccttaaagaagatccgctcgggttgaagcaagggaagttgcttggcaactgatacggcgtcggtgtattgcttatcaaatagaagaccagcgccgacagtaagactgcgtcgctgagcctctggtagttccatgtacctttggacggtgagatgttccttggcgtcttcgccctctacggacttgacaatggcctcggtgaagttgggaagttgcagcagtggtgatgagcccggggacacagcctggatgaggttctgagacgttttgaaggcaccgacgatcggtccgagattaccaaatgcgagtgaaatagcagtgaaagcttcagtgagagcaagggcgacaggagccgcttcatacttttctgcaggccagttagtggtatttcagaatatcatcggggcttttcttaccagcatccagagaagcatcaccaagatcaattcgcccaagataagcccataacaaagccaaggccttccgacgagaggagctatccaattgcttcagggtatcacggtccttgggcgtaaggaacgaattatcatctgccagcacccgcttctcgagcttgttcaggccagactcggcccgggcacccttgagcatatcgttgaattcctcgccagacgacaaagcgctaataatcccaccttcggtaatatcgtccttgtactcacggaaaatgtttccggcactggcgacaagaacgcgctcctttgtgtagcgctgagatccataccaccacttgccgacgatatatggtagaagaacacccaaaagggcaccatagaccatcagaacatatttgccattgccatccatgataatgaacttgggaagggcaataccgatactaaagctctgctttccgtcggggtggccaaattggaggtagttgtttcgcacctcctcatcggtgagagctttatatgccttggtgagctccacgaaacgctcgttgagcatctcgatggtctcattcttagaggggtcaggacgaattttatcggggtgaaagatcaaagacatgcgcttgtaatgtctggagatagctttttcatcggcgttctgtttccaagaatttagtcagtgaaatcccctggacgtaggcacgcgccgagctgaataactcaccctcgagacacccaaaatatcataagggtcgtatgccttcaccactgtcctagcggtgacgacaattaagtagaccatccatgccattacggcatagccgacgacgacggtaataatgcgcttgattcggcgctcttttcggagacgcttgcgcttctgcgcgtcaatgaggtccgcatctttaggtttgaaatcggatttgatgcggggagcggtattctcaagctctgtagatcagatatagcggttagccgggaaccacacatatatagtcccaagtctcacctttgctgggtcgtaggaggttataggtgagagggagagtgaccaggccggtcaaggtgaggatgaagaaggggaagaattgtccctgaaggttcaagttagcgttaccacgtctttatcggatcaaatcccgtccttacctgctcatcataggtgtagtctgacgacatcctgcggcgacttttagggtatagacagcggaggccgctggccgcggaatttaaagattgtgttgcgcagggctgttgatagtagccactttggatggtcaagagaaggcttttgggctaggggaatgacacagtagcctacttagagcccaaaatgctggctcacaagaaacaaaggagtgatgcaggttgggtctatcgcacttcctgatctggtgatgaccgtgtcctctagcagggtccactcaccgcctgccttaaatgggagtgaatacgtggcagttttttgagcggtgcaggcggtgaagacgacatctgatgttctacatcggttgcataactaccgtttgttgttctatcttatgcttcatggctttctacggctttctacggcttggaatgtcaaatatttgtcaaatatgttcatgatttttggtaaatgagctcaaggctgcatatatactaattaaatactctaatagagctgatcgatatccaatcgatccatgcagcagccttcaccacttcctttcagttaggagtcttgacagaacagatccatcgcacacaattctcccctcgtaataaagataaccaagacttctccagtccgcccagaaaaggaattcaagcgtcaacaactcgaggtcggacgcaaactcaaccaatccagacaaagcatcggaagcatcagccagaaaatgcctgattcattttctcatgtgtgtgatacaatcagtggaccatgatcgacacggccgggccaaaagggaccaatccgatacccgaggtatcttcattgctacaagtcggggacccgggaaacccgtgtgatctggcgttctcgccgttatagtgtggtgtgggcgcatttgcagtggccgaccgcagacgcagggcgtgcgcgttgtcggttcattttcgatggcagtttttgttttgtttttgtcgaatgcggattcataggcgtcgcatattcgtaaaatcgttttggtgttttgttcttttttgttgactgaaaaaaaaaagttggggaaacaatccgtccgggaagtctccagacagagagttcagacattcaatctccaagggcacggccactcgttctggaagaaatgtcaggattgttttttcgattgtgtcagaaccgactggtactcacgagttgatgtagtcgagtccaccgaagtactcaagtccaccgaagtactcaagcatccggtaacagaggctcacatcgtcgcccggctcgccaccgaacaaacgacactgtgcttcttccagcccagctgattccagccgcgaggggcgctcacgggtctgccacgctgtatacccatattgccatggtggagcgagggtgggagatccccgtggaatgcatgtgtcgggggagttgtcggcagacacaagcgcgcaaaagctgttctggggtgtccgaatggttgatttgacggacaaggtcggatgttgagcgagcagggtattaggtatgcggttggaacgacgagtgcggcgtctattatgcctctggcccattctcggcagttgaagaatcgaggatcaaagaaatggagaaagcacttttaacaccgaggggagcgaccatcacctcctggaaaggatgagatgaggtactgagagaaaaacggcatgcgagattgcaggggtgactctttatagaccgaactcgccaagtgagtcacttaaaggagaaaaatgggcgacccgcttttctgggtgggacccgagggaggagatcaccttgtgcgatcaccttatggctttaagaatggcgccagctcccacaaggtcctgcgctacttccaattggtccaagggcgagttttctatcgcgtcattcgaggacctccagtaatgattagaattaacggcgtttataaaatgaggtgattcgccttagagatgagcctagagatgagcctagagatgaacctagagatgagcctacaatgacattgagtcatccatgaaattgcgaaaaatgaaacacaaaaaatgaaacacaaaatgacgccgtcctctggctgtggcatgaggtgattgggactgatctaggccgatgccggattgcctaaagagtgccgtgcggaccgagcgatgatcacatcagacgatagccagctttcccggctttaccctcatctaccctgacgtaccctaaacaacatggagatgcacaagtacccaatttgcctaaacagcccggagactggcgaggtctccgctgcgattaatacctagcaagggatatttgaatttttacaccttgcgtcgaacaaacgcacgtgtgcaacgtgttcaacgttcaacgtggagaaccttggagattctcagatgccttccaagttccaagccacaaggcaatagagaacggagtcatatttgatttttcttgggagatctcggcaagctaaacgaaaccttggggtggtgactattgactcagatttaaaaatggagtgcctgatctgtgaggataaatatagcccggaagaggaaatttcttcttttgacgcttctagtccaaacagaacaaacagacaaacagacaaacaatgcaaacacccagattctagacctccttactccctacagcagatcgctgtgccaacagtgtttaccgatcactatattccggctcaatgcaatgcgcggtactgtaaatccttcctcgtctgcttcgaagcgtccacttcaatcatccacttcagagctatcgacctacgtaaaaaaaaaaaaaaatgagacgttcattcagtcgttgaccgctgtcttcaagttgtggagtgtactccgtagttagttaccccctactgacatttccaaactaacgattgcgtcttagggatgatcctattcaccatgatctccgtctaggattctccaagctcgggcatgtcatgcaaaaggcagttacaacttaaacttattctacgactcccttgtcaaagtgtgtattgtaggacggttcctgcaccggatatcccgcacctacgcctcatgcatctcggccactacttttcctgagtttacccggtttacccttagtacggtcgatcaaagaccgctgtggagtttactccatcgctccgctggatgtagaatggaagagaataaaaaagaacaaaaaaagaagctgtttcacgtattcgacggatgctgaagttctttatctccacactggggcttcgttttaatggggaactgcccaaagagagacaaaggggctggttgcgattccacacgaaaaggaggttgctcaagctggtgtctgtaggttgaagcagaaggactacgatactacggagtagactgtaagctcttgaggaacaagcgctggaagtcttgtcgatgtattctgcgttcaggggtaagaatcttagattttttcactagcgtggccgtgagggatcgaccggggaacttgaacaatagttatccattgctgccttattctggaaagcagtctttgtctattcatgtacgatgcgaggctctacccaaaacaaagacttgaaaaagcgtaatatttgagatcaaagggatcatctatgttggtcgaggtcgagaaatcggcaatatcacgtatcggcaattccatagctatcattgaccaggtctcacccagtcataactagagtcagatacaagagcaatgcattaaatgtataacggcgttaacaataatcaaagaccgacagatgtaatgaataagaagaagacggattgaaccaggccgtgtacacaaagcccgaaaagcgaaggagaagaaggtaaacataaagaaaagcgaagtgaagggtaagagggcaaaaaagaagaaacacaacccgcgtgtgtactgtacagggtcccagaatccggaccatgcctggccaccaaaagccatcattcctgtccaagacgttatgaataggatccaactctagaccaaccattcccctaggaagggcagcttgcgcatccccgaaatcatagaccgtagctccaaagacatgcatgacaagtaggaaggaatcggaaattccgactagctaccgtgtagctaccgtgtagcttcggccttacttcttgcggttagctcggcgggcagcgagatcgccctcagcgagccacttgctggcgttcaccatctggacgacgttgacgaactgcttgaacgccatgatggggaacgagatgccggtgatgatccacggccaggtgctctcgagcttgttcgcacgcgccatctcgagggctccggcgctccaggggctagcgaagaggctagctggttcggggtgcgcggggcttccaggctgggcggaggacagctgggaatcggagatgggctgcaggagcgaaggggagagggttggcgaggagaaggacaggaggtacaggccgatgaaaaaggcttcattggcggtacagcagatgaacagaacgagctaacaaaacattgcgaataagcttggggacggaatatcagttcactgcggggccttaccttgctggtgtagtactggtacataatccagctacggctaggatcgaccttcttgtggctctggctagctccgcccatgcttagagtagcgtacatgtgcatgtagtggctagccatgtccaagctgattagaccctggaaaatgatggcccatcggggccaggcggagctcaggaagactaggagacacgcagtggtgcagcggtcggtcaccatgtccagcaccgcaccgaaagtggtggattggttgaagtatcgtgctgcataaccgtccaggccgtccagcagacaggacaccgtgtagaggaaggagcaggtccgggggtggaggggcatgtagtatagcgaggcgaaggtcaaaaagacccgggaatatcctgggaacgtgttaaaccagatgccaacgtcaggcttaaagccacatcagcggggcattctaccgataagattcggagtgaagaggaagatattttccttgcgttccttggtttcttcccgtgcggatgcgccctctgaaggtgacacggagctattgcctgcatcttcgctctcctcggcgagggaggccttttgtcgtcgtgttgcgctcattgtgatgtgaaagggatgtgactggcgagcggtttctcgtataggtcgggggacgtatggataccggacagttggtctaagcgctgtcagcgtcgggtaatcaagaagcaaagacagaaacgcaccgagataagaatacagcgaattccgtcaggataaggataggaggtggtccaggtgggaaggagaatttcaacgataagggaagataagcgcgctttgttaacacgcactcgaaacttccaagggtcgatgaaagagggaaaagatgaaaaggtaggggatgaaagaggaagctggaaagatggaggaaaggaaattgtggaatgtctgcgggttactcggaaccgtggacttgagctttccccacgcggtccacttggaggtgatcgtgatcttgagagataaaaaccggactggacttgaaacatcccatatgtgggtgcaacatgtcaagtctcaaaaactgaagatgtttgtgatacttgatatagacccttggagacagcctgtttcatatatttaggtgtttcagatattgtgcgacctattataatcttgtaaaacatgcttttatagacatcatttgattatatatgaccagcctacaggcctagaagatatgtacagaacagaacccaaaatatacaagaaactcattcacgtccgtgacctgcgcggatcagtggcatcctgttcgcgccactcgcgagactccttagtacccatgctgccaacgccgccctcgagacgacgctcccagccaccaaggcgaacaacaagacaagtagcattgtcaccttccttggagacctcggtcgaaaaattgaccacatcgcgcgcgccctgctccggcgtgttggattccttgacgatatcaacgatctcctggtcaagcagtgtcccgctgatgccatcggataccaaaaccaagaacgagaactcggccgggccaagctctatgcgcgtgagttcaggctcggcagagactccgatgcgcttggagtggacatcgccgaaagcgcgcgtgttggctagcccgctcatgcgttcttcgccgaaagagtccgttacaaagcttgtggcataccgtctgagtcgggttgcctcgactggggaggaggggtggtggtttgatgtaacggggatggctataccggtttctgttgagcagaggagtatacgggtgtcgccaacatgagcaactagaaggcttgatggggcgatggggtgccagaacggggttggggtcggggtcgagatcatggcgatgcttccggtgctgccacccttgaaccgagcgcttccgccgatctgcggagatcgggtcatgctgggcctgtggaagatctcatcttcgttcagaggtcgctcggctcgaacgggatcgtcttctcgcttagctgcttgagcgttgacaaagtctagatccgctcgcaggaaggcgtactccacaacttcctcgatggagatgtggttcttaataatcgggtcgtcggactcggtgccattgtaggcgaaatgcggcggctggaacctcttgaagtagccaccaactacccgtctccaggtctgcacaaggtgtttctctagggctccgattcggcgacggtcaccctcttgcatcacaggtagttcgctagtggtgggtggcacttcggcaccaggtcgtagactggaccgaaggtcgatatcaaatgccgcgttctggatatactcgtgaaggtaatccctcaagaacgaactgcattcggatccgccatggccatcaaagataccgaaatagaagacttgtggatctccgctagcggtttccgcaccgcgcgactcccggggttcggccaaaggatcatttttgttaggtcgcctaatcgatagcgaagttggaggtcgcttcgcaaaggcggggatgtcaatgactcccgcttggtacgtgtcttcattcgaagggcgggttccgcgggaggtgacggcgccgaaatggtgcttcgcgttgcggagtggaatgcggacgactgttgtctcccggtctattaaagcttggaaggcagctggcgatcgtggtgtgtctccggtgtgaggtatagaggcggagcgaggaagtttgtggaatggtgaggccggaccacgggggtccggatgaagcgaagacgacggcagatgggtgacaaagtaatcacgaaactgtggttgtcgtctaactgccgactgaccaggcggcacagactcggtactgtagcatcgcgctcgacgaaggagagcgaagcctgggttgtgttagctaggtgcttccaagatctaaggatcctcggagttaagcagtgtagctctggtcgcacatactgtaacagtcggccgaggtccagacccggcctgttactcgcctcgctgaaaggagaatcattggcccatcgaagtataaaaaatagcagtgaggaaaagagggttgaaaaggactggtgcgtggggagaacacatatggcccgagcgtcggcagataagaaggattcggaccggcacattctttccgtgggattagcttcattgctccactcgctatatatacatcatttacctagaagagagcatatacaatccaccgacctaatacaaggtgtttacacaggggataatgggccactaatcaagccaatacatgaatcctacaaagaccttctaaaatgcgaaagagttgcatgaacacatgaagtaccaagaagtggatatcgttcttcatgggctccacttatactacgtggactacaagcagggcagagtattgaatatttcacgcaaatcgatttgaaaactgaaaaacagggccaccaggcgctaatacacagctaaaaccgaccatgtcggtatgtagcaggtcatccaagatccacggaagtggatcagaaagaagcacgggtggccaaacaagaaaaaacgaaaaacaacgctgagagagtggcacctaccgggtagcagggccgtccattaagtccacggaagacagggggatctgccttcagaaattccgggttagatttcgagaaaaaaaacacgggatgtactcgggagagttttagatggccctagttcgagagaaaagactgctgtaaactgcatccacgacgggttgggcggtgcacatctttccaccgaagtatcgaccattgaggcccttgatggcgttctcgccaccttggacgcggtcgaacttcagatagatatctccgacggaattgggatctagtgaaatgtgaacaacgtggccgtatttcttctcacactccgttcggacgtcctcttcgaggtccttgacccaggttggactgtgctctctgtaaagaagtcagcgttcattctctcatgatggcgtcaaggaaacttacagcgcggggtcaaacatgttgcgcagcaaaacacagcgactagccatgttgacattgatgggaagcggcttagtttcggtcttgggtcggaggaatttctgacggtcgtcaacagaagactggggttcgtcggttcgtgcaagctttctcatcaaagcatccctagagtagttgttgaagtttacgccagcaacatctgtgtcgtcaagtgcactagcaccggcacccttttcagtttctctgccgccagcacggtcaaagttgttggagcctccggcttgaacgccacgacctccctggccggagaacgaagaaccctggaagtttgtagaagcacctgaggcgcgattggcgtgcgagtcgggggtgaacttatcattgccgagaccaacccgaatatttcgtccagcaaggtcaaagccgttcatcttttccaaagcgttccgagcttgatcggggtgggcaaatctggtcaagtcagttaatggaagtgtcaataacatggacggacaacgtactgaacgaatgcatatcccttgcttctaccactctcgtccgtttgcagctgaacgaactcgaggtcgccaaatggttcgaagacattggtgatatccttctcggtaatgctgaagtgaacattaccgacataaagtctgtggaagggtgcggtgtggtggtttcctgctggagcctccgggtttcgggctgcctggcggttcttttccgcttcagtcagttgggcaatgacgggaattcctgcgagcatctggccggtgagtcggatggcggcggagacagactcctcgtttttgaactcgacataaccgacactatacaaaatatgagaaagtgctttaaccaagtaatcatgtgaatacataccctttggagcgaccgttaacacgatcccggacgatttgagcatccttaacggggccggccttttcaaagaaggcaatcaaatccttgattctcaggcgggcagcaagttgctgcacaaagacagtgcgactgtcacgttcatcctcgttcagttctggagacttgcggctggcggcggatccacggcgaacatcagcatcacggcgggggcgtcgttcttcctcacgctggcggcgattgggccggtagtggcgatcgtcatagggagaacgggagcgggaacgaacgcgacctccaccacggtagaagtcaccgttggagcggtagccgtcacggtcacggcgagaacggcgtctctcagattcgcgactcttgctcctctttcggcttctaaggcttccattagcactaacagtgtcgctcttggcgacttcgtctccctgaaggtcacggtcagggcggcggtcacggctgtggtcgcggcgacgacgtctgtcgcgggaacgatcacggcgctcggtggggtccgcgcgggaatccgaagtggcgggggcctcgacgggggcctcgatgggggcggccgcagtagactcaaggagagcctctacgtcaagtccagacatcttgggaggtagcctgttgttgatcagggtagaaatgatcggggtggggatatcactttgtaggggtcagatcgcgtacggggacgcagagttggtattcgaaccctgattatgggatcagagtgaggtctccttggggtttgaccctttttacacgctttgggactcttgttcttgatgaaagtcacgccagaaacgcgacaaaagatgatgggggcttgaagcactgggggtgatggtatagtataaataaatttggttggccgggacctcgggaggcacaaagagggtcgaggcggtgaaaagaagagaagagtcacgtgggatctgagatttctcgccgccttatatatcaaggcggtctggtttctgcctgaggcataagattacgcgttgaacttggaaccttaaaaatgtcagtatacttctatggatacaagcaatacgtttgacagcgcggaagaatctgccttttatttcctttgccccttgatatctgtcggatccacgctctaaagtgtcacttttctttcatctacatctctatgattgtgaaaattgcccacttgtttgcctaagtaggcaaaagttcacccaagtaactattacaaacgacttctgacacgtagtagatactatatagatatagatattattttcttgcattatgattaacggtcatatacactgataagtgatgcttgttttaaaaaaaaggaatcaactccgcttgcaactagcatcatcacaagatatgacatgacaaagtctccccctgagaccaaccagaaactccacactagccaatatacttgaggagtaccgaagagtagtgactcgatcgtactcggcgttaaatcgtgacttgaggactagtgacagccccatattaatgctgtgatttcttgggctcactgagccttgacgcccttcggggcgggagacaccaactcggtgccaaagactcgatcccagaatcggctggtcacgccaaagccattctcgtaatcggcaaaatggtgctgaaggtggtacttcttgagctccttgtagtatgaaggaagactatatggatgttagcatggtttcattgtatcaaagatggagttcaacttacctgcggtggtgcaggaaataatgggtgagatcatagcaaatatacccgaagatgccgccggagaataccgacgtagccgcataccagttgtaatagaatactgcgtgtgccagcttccagaaaggagcggctagtaccacgaatagtgtcggtggcataacgagacgatacttgtccatcgggagatagtggtggataccgtggagcaggaagtgcagggtaataccgacacggttatccggaagatagtggtcaatgtggaagaggaatcggtgcaacagatactcgatcagagtccagaggcacacgccaacggtgaagtaggaggcagcaacgacggagttacccagcccgatagcccccactgttattccgtaggcaacacatggcaaccaaatagttggcacgatgtaccatgcggttttgctgagaggctccaggaagttgccgaacaaaggagcggactcccctccccggtagtgacgaggccgatgaatctgctccaagtagaactccttggagaagttgctgtaccacagctgcagcagaagcggcttgtttaagtccaggaacttatgggttttgtagtcctggctatagtcggtgtctatcgacaggtcctcctcccgagacattccagtagttgtgtaaatgggtccggactcggtttcggtcaccgtttcgatgacagtggtcgtggttgtcgtagttttgccaggtgtcgagacatcggagacaaagccaatgtggcactcatccaaaatttcataggcagcgtcgctgtgctcgtgggagacctcatctttcaggatatccgtcacatcctgcccggcatactccaggatcagatcgccaccaccggggtgcgcgtcgaggaaatcggtgacatcgtaaacgttacgccccacggtgatgtagcatgacttgtcggtgttgtgggattggacgtcggcggaggtcaacgttggcagaactctcccaggcatgttggcggaaatgcaagagaaacaaaataggggaaataggggaaaggaaatagccttggaatagtaggtagaatgggagatgaaaatccgaaaggcggcgaataataagaattaatcaggggaggcgtggcgtgacaccagaagccgagaaccagggatccgcctgctcccggagccttggaaattttcgaatgctcaacttgccattggatcaggcaacaaggttggacagggtccacatcggacttcgatcaatagcctattagaaagtaactccttatttaattcgacacaaaaaatatgcaaggtacgcttacagatgtagttttgtacatctccccatctcatgtcggtggggctgttatatcttagccgccttggagaggcgcgtgagggacctcgggaggaatcgcggtctagccttagctcagctgttaagcttctactctctaacttgcttttcaggcagcttatgatcaaggcggccgagtgcactagacagtagatcggcaagatggttatataagacaggagttgctgggacatgccaagaaagatgagacacgaagccggaaccatagaaatatatcgcctttttctgaagccgaagcattctgatctatcatatctgtgaagacaatggcaaaagcaagccaaatcggttggatagccagtggatgtaaggatcgtgtcttgatgctaatatttttaaagacaaaggactgtagaatatgtacggagtacctagtcaaggatgacaccttgtgctgagacaggagtttgacaaccgtcggaatttataagaagcttacattacctctgccttttcctaacagcctgatgttcccagatcaagtattttcgacagatgtgggagtccctacacgcgtgggcaattttaattaggtttttaaatatggttggttgaaaggcatcataagatttggatgaacctagaatcattatatatacttcgtaccaacgaggcagaaagagaccaagaagatgtatctttggattaataggaaggccaagttggtggatcagcaaggagaaaaaggaagtctagttaggaatggataaaaggagagattaacgtactagtcaccatatggacgtagcatgttctatatttgtacttgatggtcttccagctgtactccgtacatggacaacgatgacttccgtctaaccagatatagttagtacgtcaccacataggctatacctagataggaatagtcagcgccgctatccccaaacaggctagagttatcagttaaactgcgaaaccgctcaggctaagctgctagctcctttgacgagattctcagcaatcctccctaactccgaggcttggggactcagactggatttccgtttgccacccggttgatcggtctaatataaacacgaaaatcagcagccagaccccatattgaccccattaatggagacgatccccataagcacatcggcctgacaggaacagaaagtacctctcgaaacaaaccccgagatcctccagagggaaaggatctgtcaaattgaccaaaggcctatacgaagtacagcatactagtacacatccagtacatgctccgtactctattcagtgggcagtctctgtacgcgcccggctctcggccgggctaagtctccactgagagtctagcgttatcccgcggggctatggccggaacgataacttacaacgctattatgggctatttatcggcctctgcatggtcaattccaattttgaatcagggattatacctcgcactaattagtagtggagatttcagcccctcttccttcccacattctctaacttcttttttcttgtctctcttgtacttgtaatcttccctgtcctcatacgatatacccttctacgctccctctccctccaccgcccacaatgtcgaccgcagagaactggtcccccgagaacccaatcctggcctacctgcagacattagtgactaccaaaaagactcttccttatgggcagcccgtcgtcgtccacgcctctgtcagtcacatcaactccgcttcattgctgcggctggccgcagagatcggcccgcacatcgccatactacaaattccagccgatgtcatcgacgactggtccagcgacaccattgaacaacttcagtacctgtccaagaaacatagatttctactgtgggaaggaagcaagattctgaacccgttggtaaattttatgggcagagcggacgcgccgttggaaacgagacaggctttggccgactttatcaagaagtcatacaccagtggcccattgagaacggcgacatggtccaatctggccacctcgtgggcccccgcagctccagtggaccaacaggaaaacgatgtactgatccctaccttgcgattggcggctcgcgaggccgttgcgacaactgcgaagataatccaaaccgagatctctgccgagatgaataactactcgtcgggcgaggaggtagagatcatcatcccctccacggaaacaagcaacggttggaaagaattcagtccgaataatacgggatcgtccttacggaaatcgtcaaccatctcggtcaccaccgagtccgtgactctgcacgcgcaattccacgcagatgacggtgtcccaactcccccgcaactggcccgcagcgttgcactgtgtctacccggtaccattgacaccgcatttacccccgatttccgccaaagtacgataatcgccgcatgtgccaactccgactttgtcatcggattcgcaacgaacgagccctttttcgtcaatcaccgaggaaccgatatctttgaattggccttattcgacggcaacggaaatccccaagcaggtatcgacgctgcgaaactcgccaccttgccttatctcaacgaaaatgggaaatcgctcggtgtattctctcttgtatcacccactcttagcctcggctttgagtttgatcctgctttcaagcctaatggaagtgaatcatctgcccctggcaatgaaactccatacaaggtgcaatacctataccatgcaatcgggcaagcggtagccctccgggaaaagaacaaacaagaacaagaagcctccggtcttccagagagaacaccggtgggccccaaaatcatgcatattccagtggttattattgtataatgacagacagatagcgcttgttgttctgcatactcgctggccgttggcgagttttaatggcctcattcaagatcggcacctttggacttgagtatgtatgctatacgcccatcttgttttactttttgcgacctgccaatattttcaagcctcactcgtgtcggtacctacaccaaaagtgtctttacatataccaatgaatttgatgaacagataaatggctggcctaacttgtgctcgaatgtaaaatcccgaggtccattgtgaagataaatttaggccttaattatcaggctacaggcacgtgccatttcttagtcatattgtaggaatcgcctccagggctccaccctggccaaggtgggcatggagatcaacagtgaaagtgctttcagctctatagacattctactctatcttctctcgggtcctctatgcattaatgttcgtctttttccttataaagctgatcatggaatcaaattagtatttggttgccaaacagttgacctaattgacatcgaacaccaaccgccatcttcatgaacccattccgaaactcgaaaatactttgctatgacagtacataagacacctcgctggacagaatccccttgattatttacatccaatgtttgcctccacagccacagtttctcgccatatcatacccacagagaccttcgggaaactcgacagccatgaacccagccaaaaccccaggccatcaaagtgggctttctggtcaaaatgaccttcaacagaatggcgaagaaccgccaattacagttatcgccgcgaatggggacctaattctcgagtacatcgctcccggcgactcttcgtcgtcacccaccaagcgcaaatggcaggtggcaagcgagcgtcttacctcccacagtccatatttccaagcactactggatcccaccaagttctccgagggaagacagttcaatgcccagaagcaagcctggaatgaatcccagacaccagacccagcctcacagcatgcgctaccaacggtcaggcttcctaacgtccgctctaccagcatgtgcggagaagatgccattgagttatttttgaagattctttgccttgattctttggatgaaaacgaaagagctgtgtttgaaaatgagttgaagacccagtctacatcgcttgttgcgagaatgatcgaccttgccgattcattgaattctcctcgtgttgttcaggatgttctgcagaggattggatatttatatggaaagtcaaagactgcgctccttgccaggtttaattcagctttgttatcaatgaaggaagatcggattcgacagatcatcttcatatccgccttcctcgatgattcacgactcactagaatcatgacccacgccttgctggttgtgggctccagattctggataaatgggctagttgcccctgaagaagaatctttgcgctggagatatttaccaaatgggttagaaggtgggtttccattaatcccaactagtttccgttagctaaatcatctttctgcagaggaaatctattgccgacgtcaatatgttttgaacaccatcaccgatctacaggctcatttccttcgagtctacgggggtctggaggaaaccgacagtgcaaggtccgcagcaaacaacagaacattgggcagggcattcaccgcgtctgcacatacgctttttcaatctcgtcaattccaatgccgaggcggattcaacaacgccagccagtgcgacctcttccaactcggccagatgatccgatttttctcactgcgcgccagaacgatcttcctaggatcgacattgatagacccggatttcgactcagctccccacgacgatggtcacacagctggcgaatctaggaacgaccaacctccaggcccaccatctgatatcacagccatcatcgcctctatcaaacaatatcctgattatacaatcgacgaagcgcacaccggctgcggtnnnnnnnnnnnnnnnnnnnnnnnnnnnnnnnnnnnnnnnnnnnnnnnnnnnnnnnnnnnnnnnnnnnnnnnnnnnnnnnnnnnnnnnnnnnnnnnnnnnnnnnnnnnnnnnnnnnnnnnnnnnnnnnnnnnnnnnnnnnnnnnnnnnnnnnnnnnnnnnnnnnnnnnnnnnnnnnnnnnnnnnnnnnnnnnnnnnnnnnnnnnnnnnnncggctgcggtgtgcgtcgtcgcattatgcctgctttagagtgcatcgaaaaattcgtcttggatgaccgcggtctccttggtatcacccccgcagtctcggatactgctgtttcagacccatctcgaccctcaaaatggacgctttggtcagacttcacgcgcaagaaacacacagtcgacatttcttttgcgagagtcacggctgtatactacccttcggcgccgtcgaaaaatcaagccacccgctccactcaagaagaacttggacggctgttgtttactgctgctcggagggattggagtgcggcgggctcagcctgatgcttcgtacatgaataattaaactatttataccacaattcagaaacgccgggtgatccctgcgtatcgtcctaggccgatttaaaacttcatggtatagcctactttattatgacttgtgaaattctagagaaacggtggagcttgtcattgccaaactctagaagtctgacaataaatggtccgcattagattatgtcctgatcataagcgagtcaacccccaactaggtcatcaagtggagtttagcctgtaattgagtattgctcttcaattgaggaaagactgccagagatagctctatatatgattatatgatcaatgtatagcgcctagaggcaagtctgctcgttagcgcagattatttcctatgttaacacacagtagacataaacaagagagagcacatgcccagttgccaagttgggaattctaggtaccacgtcacaatgattgaaaacccaccatgacgaaatccgtcgccccctaacggcgtgtccggaaatacgacagaatgatccaagagaattagaagagaagaaacagtttcggccggtctagacttcgtgttttcgatctaggggtgcattccggctggctccagcatatacgtccagaccttgggagtacatgggactcgatgatctggttctgggagaagcttaaagttggaggttctgtggatgcgaggagtatatgtggactatggccttggattgtagtgatcgatgtatattagtgtacataacagaatatcgtatatgtttctttgatgccaatagacatggaatgaagcgtttaagtatcaatcaagacaatgtataccagcttccacaaaacaatgaactcgtgtatcgaattgtgacttgtagatggtctgggagaagttcagagaaacaagaatcacttttctctatagtgtctatatgaagacaggtgtggaattttctttcttttgatggcatgcaaatgaagcgacagaagaaaagaacccggatccagataactgcagagatatttttccaatttgattctgcgtcaattttgactttgatttttttctttttttttttttcgtatgtccattcatccacatagatatcaaccgttcaacataccggatcaccccagaagtaccccatgtcaagatccatgttcggaccagaggggaagaaagagcccgtgatctggccggtggctgggtcataggggaaacattcgtcatacgagctccgacccgagagatccttctcttgtttgatgaactgatcgagtagatccggcgcctcgagactgtaggattcagacaagccgagaggagtgttggattgatccatcgcggagcaggtgattgagtccagctcggcggagatagcatccaccgccactgctgcgggcatagtcgcggacggatcaaatgccacatcctcggctgctggctcttctgccatggcggagtttgcggtttcagggatatcgaagagggagtctgagtcttcggtgctggggaaatcattcacgttgattccgatatggggtgccaggcggcggaggaatccgtcgcaaagcttccaggctctttctgacgccatgttggtttttgatagtgtcgatagccagtccagggctttctttgcggctttggagaccatcgtctctttctccgggacatgctgcgcccggaatgccagctcgagtaggagaacagtaaccgcctgcatcagataatgtaatgtgcaccaccatggcgacatgcggtatagtagaactgcatcgggggtgtccgggaatagtgtaagcatgtggcatgcagcctcgacacattccgccgcggtcttgttgcagaactcgtaagtcttgtcctcctccgaggggggttgatctaagcgacagaggcacggccgggtgattccgattttggtgctgtaaaatagaaaggcgaggcccattcgctggctgatagggcattgggatgtctgtgtcgaggtgaaatcgtatgcagcaggaagattcatgaaccatgaatcaatctcaagcatcaggctcttgatggtaaactcggtgcttgcccatggagactgcagcgcttctgggctgtagagtttcactgtcacccgcttggaaatgctcgtcaaggaggccagctgcaagaagtaaagtgaagtgcaaggcggaagactcttgagatactcagctctgctcaattttttgtcgccctcagcaggaaaatcatttgaatcagaatcagccgcagattctaggtcctctgcgctgctgttggtgggcatacgctcggaaccactggatgtacggaatacagccgtgcctatcagccgagccacttcgtctttttggaaatcactctcgtcaaaaggaacaggcattggtgtggtgcaggagctgtcaatgatacacgagggacgcccagtcatgatagtaagtagatgatccagcgtatacaatgaccaccataccctgtagcgtatctctttggaagtgtctgatatgctcgtaccaacgttgcgcaagtgcaatccaagagccagcgctcctcgaactgcacttccagagagtttccaggccctgcaagagccgatattatgagtatataattgggatttgcaggcttggcaacttaccgattgatatgtcccgaggccactagatagaatgaagtaagcccctcgacttgcaattgctgtaggtcaggatgatggagaatttgatcttccaagctcaaggcccgcgcccttgaaaagtacatttggtggtcatcatcctcttccttcgcgtccgagttcgtcagctgcttatatttagccgcaatggcaaagatcaggttgagtatagcgagccacttgtttcctggcttgagagaaggttgactgaaaaagacctggaattgggggacaaaggttgaaaccccaatgattgggaaggatggatgcactgaagtcagataggcattgagcattttgcctgccatttcccgggatgggactccatacatatcactttggtctgcagtcggaatgtctagatcatcaagataatagttggaagccactacccatggctcgcttagattctccggtcgaggcgttagagttggagagggcagaccgttatcgtcatctgtgttgggaagagttgacggccaggcctcaaattcactgttgatctctttgctaagcctttggagccaagtaatctcagagctttttccaatgaaacccgttgctcgtgcagtttcatctctgttgaagtcctcctctgtttggtcgccacattcaagaggactaacagatgatgcgcgggagggtggtggctcagaacccgcatgccatgagatccttcgttctccagcggctgcaaggcatgtttccgggttgaatgccaagtcaggggccgattcctgggttggtattagacacagtcatcggatgtggatcaaacttcataccgctgccagggcaatgttcacgagttgctcatcagacacgccaaaacgattgctcagcttgctaatgacatcttcatatgcctgcacctttgcggataagcttgccaactgtcttttgtttttagtagatcatagacgtcagctcttgtaatgacggtgcactatatattggcccataccgcttggacttttcccgcttgccatcggtatagcagcagatgattccagcctctcgacagttgcggcatccggacttgtctccggtgcactttgtcttccgttgtctgcaagactcgcatgctcgacgaacgtgtcgacggtgaaacctgccaggagaggtgaaggcagattcggctccttccgctagtcgcgggatagccattttcttgccaacttcagattcaccttggagatgagagactgggttatcctatagatgctttatcagatcatactccttagcttagatcatgatttcacacttaccacactggaaaactgattacacgtgtctgcatcagtgcatgataatttgaagaggctctgttgctcattccatgagggaaatggaatattactcatggtgaaccatataaagattgaagctgtccactgagtgtcagtagaattcgcaactacatcttcctctttacttacttggatgaataaaggacaatgtctgggtcccaagagattttgatatatattgaaatgacaatatcaggaattgaccaatgggctgcagtgacatctgtcaaatcaaatagtcacaatgtgaagacgagaaggaaggttggattttataaaacaccccaggatctgacccacgagaaacatagactggggaaggacaaaggagaagaaaggttcgggttttcgggcaccgttgggaatcttaagctggtcaagctagatagatactctgtgatgacatgccatgctcgtttagggtaagccaacggcgcattattggctaccagtccaccgaattagggatagttgatttgcctcaagtgtccttgtagggcatggggcgaataggtcaacgttttcatgagcaaaataccttcttttggttattgaccacactatttgccatcaaccaaacattcttactccagagagagcctgaggtattggcttaaccatcagactacctcccccggtgatccattgttgagggtcagctttcggttgttagtaccgactagctctggagtccgatgtagtgaccaaggatcggatgaaagaggatgtaagctacttatacagagtcaacaacgccttcaacctcaggctgttcttcaattgaagttgtatgtagccaattccacgtaaaacatggaacatacagcattgaggcttagaaagggatatatagaccagtagtaaatagtaaacacctagtaaataacatccaggcccagacctcttcgaagtcaatctgacgtctggtggcgccacatttgacgttggttcgtccctggttggcattcaggccaggacacattcggaaagggaagagaaagcttgacggcaattctcaccatgtcttgtgtgtacgtaccccgtctttttgctctgcgagataatcctgacgtcccattacgtgatgattataaccttcaaatagggccttgtttgtcaggcaaccctaacaatttagaaaatgaactacagttatggatgttctgagcttatattaataaaagttaaaaaggaattggcttaacacgatcttggaagtaaagaacacgatccgaacatcattaggaactctatacagtagtccaggcccatttttactcaatgaggaagttgtctgcaacactgcgaacttccttcgagaatgcaacaccctcaccctccatatccagtagggaaacattgttgatgtcgacatccacgaaaggcttggtcttcgtgaagtggacactcatcgggaagaattcattctcgtcagcatcaatcgcctcgaactcaaagctgccagaggcattcgactgatcaacagtgcccaggttccagtccagactgtcaccggagacctcgtagaccgcatcaaagctagatacagcaggctcggtcgtgccatatggaatagtgacgaccacatcgcggagactatcgtcgcccgtgagctcatactccacagtcaccgtggtggagtcagagcccttgtttacccaaacggtgaatgtgattggaagaatatcggcattatcagccgaactggcaacacgccaccggagaactccgatggagttgttggcagggaagcgcttggtagtgtccttcagttggatgaccgaagagttggtgaagagagctttgtcgacattagggtgagtgcggaactgtgcgccatgtgtgggaatagcctggcagtcgagtcggagtttggtgagtgagggatcactgatacggagttgcatgtcacccttgacctcgaaagatttcaaggctccctcccgagtaagtgtggctgagatggtctcggcgattgtgagttggatgggctcccgatccgcctggagagactcgcgggctgagggaatgtcatgcactggagccgaagctcgtgcagccaccaatgggctctcctcctcaatttcgggccccatatcaccccggaccttctcgtagatatccgttgcctttgatttcttgcccagttgcatgcccttgccgcgggtgggaatgggcctagtgatcacgcagtcagcagtagtttcgcaacggtgaaattagaaaaccaaacgtacttggaaaaggactgtttcttttcggcctcgtatgaatcatagctgtcaggcacggaggggcgcgctgggggtgtgtagacggggtaggttggggttcttggggcggcggcgcgacctgtgcgagcagcctctttgcgttgcatttccagctgcttcgcctttctcttgcgctcctcgctggcctccagctctttgttctatcaatgtatgttagccatgaactaatttcactggtgattccacatacccgctcaatgatttcctggattctctcctcatgactctccatttccaggaaggtcttgatctgagtgagagaaaggttctcccggtatcccatagttaccaattcatcaaacgcactcaggagctcaaaggcattgcgaagaatctcccgctcgtctaggctcttgcagatgctggtagtgacttgcgcaaagagatggagactgtcgatgtcttggagaatgttcgattgacggttggtgatcagcacgatatacaactcatccaatggttggtacacgaagcgcacgttgtcttgctcgacagtagtatgctgggttccggagtctgccagcttagggaaggaggcgagaagggcttcaattcgggagcgggagatctctcggaactggcgcgagagaaccgctttacctccacgggtgcatatcgacgctgcgagaacaacctgttgtgtgttgattagtccaattccccgcggattagattaaaacaaggacttaccatggtgaaaaacagcacagagggagcacacaaatgacaggaaaagagtgatcaaagaaaagagtacagaaagtgatagagaagcgtagggttgactggaagcgtaggccctgatgttggttggcggcggtagggagctactctgttcacttcggcgacggttggcccgtgcattcacttcgcttagtcgtcgaccagatactttctttctctcttcacttcatcttttcccgcgcgttgaattccccaccaacactcagttcatcatctctcttgctattactcgtaatctttcactctgcgtatcgccgaggaaacttttctctttcactctcaaaccccacttcaaccgcgttcatggaacgtcattgctgaagtttccaatacgaccccagatctcattttcacgcgtttacttgctatgacaacagctcccttgatcgcctaccccacaatggaagctcccgctacgggtgattctatggagatggcctcgccctaccaagggccggctgacgatttcgatatcgacatcgacctcatggaggaccatgtctcgaacatggatagcgatatgatgggcgcagaggaatttacaaatacttctcagcctactgaactcaacaatgatgcgatctacgatgccgacatggccgatgaaccctccgaagggtcgatgatcgacgctgacaactacgccgatgaagacaacgatattgacgtgcaatttgaggaagagccatatgaggaagaaatgattgaagccgatcaggtggaggatgttaatattgccacccctatcattcatcttgaacctgccggccgcaatgaagatgctgccagccccattaaggaggatatcacagtcacatccgtggaacttctcgaagcagcacctcaagaattaagcgactctgcgggacttgccccagtttcagacaaagcccaggtttctgaagttgaaggccaagacacccagacccacctgagcacggctgttgatgaccttactgaggaaccatccggaaatgccatcagtaccgaaacccgcggccataatgaaaaggcagagcttggtgaagaggctaacgagacatcaaagtctcctttgacagaggctgaggtaacgcaagttcccaacgaagacccggagaccagccaaatcaaaccttccgccgaatattcccacgatgacgctgcgcacccagaggcgcagcctgtgtctgaggaaaatcaccaggttgcagatgaagaacactcgccccaacaggtcacatacatggatgaacctcttcatcccgtcaaaattctctaccaggattgcgagatcgccctgtttcctcccctcgagggagactcgtcggatacattcttcattgaagatgaagctttagcttacgacaacgttgatcaaatcttcaaggctctacgccaggtgcttcaaaaaaccatggcaggcaatgaggttttggtcatcgatattgacactctcggtatccaaataacagaggtaagtactctcttaattatcctcctggcaaacgtactgactcatcctatcaggactcgatccatacatcccaggtaaccttgcatcagattctagatctttacctcagactttgtcgtaacgatggcactaccgatcccgaagccctctaccttacactgagcaccaagcgtgcgttcccggccgagatcgcagatctcaatgacgctgcaatggaaggcaagaaactttctgaacttcattccgaacttcaatcttgggatgaatatgatgaaggcgagccaggttccgagggggatcttgttgctcatggggctgaggagcatgaagatgaactctactacaccaatgaggcccaaaaagagctatcaactacggaagtgcaaacggctccagcacctggagaagatcaggcgttagatggcgaacatcctcaggtccagcccgaagctgtctctggtgctcaatcagagattgtgcatgcgcaggacgaggatagatctacctccagggagcggagtgccgaggccgcacgtgagcctgaatctcatccagcccagcccgagaacacagagccagatcaccttgatgtgtctcgccatctcgaaacagaccaagatcaggaatacgatcatggcgatggcgatgtcaacgaagagaactatgattccgagggccggcagagtgattctactgccacgttagctgcactgcctggcgcaagcgagattcaagagcataccgagcatgcccctttggacgtttctgtgaacgccgtcacagatgaaaacgacaatgatcactattacggagagaatgccgagaacgatgatctgggagatgacgaatattatgaggatgacccggtcgaagatttagaggctttccaaaatgatatcactggcagtgaaaatgctgatgatgctcaagaaccagccgatcaggcgcctgtctttgatgaagaggacacagatgagttagatgccccgccgacagacgaagttgtctcggaaactaccttgcgtgatgaatccaagcacttttcccatgaccagccggcaccgccccttgacagcggcttgcatgacacctctgacaagaaggagaaaacaccagagcctgcagatgatttacttggaatcgctgtagacctgatgcagactcccccgagagatacagagaacgatgcccttgatcactttgagggcatagactacgacgagccagaggatgaactggatgcccctgttgcagctgatgatgggggtgccaatcacgagtttgacgagaaccattttggcgactatgacacccattttgaagagtcggaggctgtagagttggttggaacagatccttcctcgacagacgccgaaacccacccgaactcgtcttctaaacggtcccgcgaagatgaagatgactgggacttggtggaaagcaccattgacaccaaacgtcgccgctcttcgtaaactatgctcccattttttttttctttactcctggagatttctccaatctttcttcgtcatgcctggtgtccagcgagtctgacctttgatgacttgttccacgcgacccataaccctccgacatactgttaaccatacttgccagcaacgacctcaaccgatggacgcagtgtctcgtctcactactaaccaaaacaggtatgtcgacccctttccccagtacgcgcagcgcacgccttcaactttctcggggtatgcgctttctctttttttcatcccgcatctgaatcaaaccccggtgccctcaactcgagacatcattcaattgcccgtgatctcttcctgcgtttctttcttttttgtcctttgactctttccccattgcgattcaagataccactgccggtcttcggccaaaatctttgctttcggtgttcatggatgcccgtttgggctgcgtgcttttcgatgcatttccttagggtctggcgtatcggcgcgatgggctagtccacgtggttgtagtattctaccaatgaattttacccacatcttttagttctcaggcgtctcaacttgtaaatctcaagtataaattaagaggaatctaaatgtccgatctcttacccccagatttgaattagctaatttcgcttatttagttatggggcccaaatgagaaacattccggggagagcgggtcggcatagtgtagaatagatgtacatgtatgttttgcaggtataaggaactatagtctatatgtacgatgtagattgtacgctattgtacgttagtactcgatgcggatggtttatttttacattcaattctatattgattcagccacgcaagacgatgtcatgctatggatctaaactggagttctctagggattccaggctaagtatagaaacctacgccgcattcggcgggctgaaacgccggtcttggcctcatttcagggtccatatttaataaatacaaagatgcaaagatacgccgttgactagctactggactactgcttttacctctaggtagaacctggggacagagggtgacacatggtagtgttgtgtagataataatgcactaaatcgagtcgatatgtacaacatagttaatagtacggagttggggccacctatttcaatctacctcgatctctgcatattttatataaaactccagaatgcaaagggaaattaagattaaaaattacctaaagcactgcaacacggcacttgaaccttggaaagcctccctacgcctccccaagccctctagccctgttgttctcttacgcgtcccccgatcgggcttgaaacggaaccccaccgcacgcaggcacatctctggcttctggcttgcttggccatcacctcactatcttcttcacatcctccttactcatcagaaatctcgggctggctcgtttttctgttttgtccttattcgctccctttgcctccccctagtcccgagcctttagcctattaccacgaccccttccttcgctcacccgagtctctcgctcattccccgacgcattgccggcactggaggtctttcgacagtaggagctcccggctcctaagataggaatcactcaagatgcttccagataagtacgtcgcttccacccgccgaattggcccacgacggcaagcttgtcagttctaacatggttgcgcgctgcgccattatagatatgtcgggcttattttagccattgtatcgaccatggccatcggcaccagttttgtgatcaccaaaaaggttggtgtgcccatcctccagaaacggacgcttcgatcccgagtgcgcgagacaaacaccgcggcgattcggtccaaagcgatcatcatcggagcggagtcgctaatgcgtctgaatacagggcttgatgcacgcctccgaacgacatggatttgagggcgaaggtttctcatatttgaagagtcccgtgtggtggggtggtatagtgacacgtacggaaaccaatcgtcagattcgacaattcgccagatgctaacgggttcatagtggctcttggcgaagtcgcaaacttcgctgcctacgcttttgcgcctgccatcctggttacgcccttgggtgcgctgagtgttctcatcgggtagggatctcttcaacatcgtgcattcgcctcatagctgacatgacacaacacagtgcggtcttgagttcgtacttcctcaacgagatacttggtgtattaggaaaactaggctgtgcgctgtgcttgctgggatcggtcgtcatcgttctccatgcgcctccagacaagcaggtggagaccgtcgatgagattcttggatatgcggtccagccaggtacgaagacttgatcggtgtcgcccaaaaactaccgctgactttgcgactaggattccttctttactgtgtcgcagttgcgatcttctcgactctgatgatctaccgggttgcgccggtctatggcaagaagaacccgctcgtctacatctcgatttgctccactgttggatcggtctcggtcatgtcagtcaaggcctttggcattgcagtgaaattgaccattggcggcaacaaccaatttgtccacgcgtccacctacgtctttgccattgtaaccggattttgcattctgacgcagatgaactacttcaacaaggcattgaactctttctcgacttcgatgtgagtgcagacatcaagtaatatggagatgcgaggctaacatgattcttcaaacagcgtgaacccactttattatgtcaccttcacaaccgcgactctctgtgcctcgtttattctcttcaagggattcaacaccactgacgccgtcaacaccatatctttactctgtggattcctcatcatcttcaccggcgtgtacctcctgaacctctcacgacatgacccggatggacacagcatggtgaattcaaaacttgacgaggatggagtgccaacagacggtatgacgagtttccagacccgtcgctcaatgcagtcccgccgaagcgagtcgagtgcatatttcaatggcaccagcgaccgcgaaggcctcatacacgcatacgatgtggagaacgggatcggcatgaacaacttgaccgaagaaagtaatggggagccaggcccgactttcccgcggacggatacgcagactgcactgcacacgaagcggaacagtcagctctgatcgcggatgtctcaaggtcttccaatcctcgccttatatcgaggtctttgaaattattctccttcgtctttacacaatcgactgctagcaagcttcccttccacgggcttgatctccacttgtatttttactgttccccgaatatgccagagttgcattgaaactcgggcgaactcaggcactggacatgtctgtatgaacgactggatatgactctgggtttctctggatggttgggatttgatgtctttcttcttctagttccttttttttctttttttttttttctaccggtgatctggcgtgccgagaggcttgtatatagttcaagttggatttctgcagaatagactggcgacgtatctgggtggggctgggccgatgatgtatttgcaggtcagctgtttatggaacatgcccatccgagattcttgcttttgcaattccaagttcaacatctttaaactattgccggttcttggctacctttgcgaggggtctatagacgtcaaccttggaagggcagagtgatactcccctcgaacgcggggaactcgcgcgatgcccactttattgcgcaaagtggccatcgtcgccgcagtcgacggtctggtcctacatcctcatgccagcgggtcgcggcatacgggtagtaacaatgaggcgtcatccatccgcatcgactataagacaaacaaaatcacagcgttgcccgcttccggcccggagcccctcgatggaaaggacgccctagagctagaggcctacggtctcgtaggtatgttgacgaactgagtgaaaaccgaaatagaaactaaccgcaatgcgctactgccacaggtctcttatctgtcgcttcaagttcattcctcgtttccatcacacagcgccagcaagtagcgcagatccgaggccgcccgatctacaccgtaaccaacgtcgcgatcattccgatctcatcgcaagccgatgcttcccgcgcaatcacacaggccaggaaagaatcctcgcaacaggaagccaccattgaatcctccgatgaagaggacctgaccgataacgaatccgacagagccgatgcggaagcagagatcggcagcgcgcccgcatcgcccactcgcgatgcatctcgtgtccgcggcaccagcgtcggcagtatcgcagaagacgtgatagcgaaaaagttccgcttcggcaggtttgcggccgattggctatcgcgcaaagacctgggattgcccaggcccgtaactcaggagcaggatgtgttggagtctcccgttgacgaagcctccactcctcctccttcgggtaatggcagtgaggtgaatctcgacgctgtggatgagtctctgtctgaagaggctggggctcagagcgagcctgatcggcctaaatctgaccaggctgcggaattgctgccgaaactgcttcgctatacgaaacttttgtttgcatcgcataattttttctttgcttatgattatgacctgacgcgctgtttacatgtgcaggaagctcggaaagatcagcttcccctatataaagctgtggatccattggtatgtgcgaactgagggcttgtagtatgtttgaagattggcgtgctgactcgttgacagtatttttggaatagacatttgatgacaaaattcattgaccatggggctcatggatttgttctcccgttggttcaaggctttgtcggccaacgagaattcacaatcgctggtgctgaaaagaaacaaacttcgaaggactcagcagaactcgcgaaaggccgaattctcggtgaaaaagacgaggccgaagctgtggagactgatgctagcaaacgtgattatctattgactatcgtttctcgacggtctgtcaagcgaccgggtcttcgttacctgcgccgtggtgtcgatgatgagggcaacacagccaacacagtcgaaaccgagcagattctctcggttccggattggaccccgtctcaccctgcctactcatatttgcaagtccggggttccgttcctctttatttctctcagtcgccatatgctttgaagccagttccagtgctccatcactctgcggaaacgaatcttctcgccttcactagacacttccgagagttcagtcgacgatatggaaatatccaggctgtctctcttattgataagctagccggtgaactgaagctaggagagcaatacgagcgatataccgaagccttcaatgccgccggtgggatcgatggtaaaccattgaaacttgaatggtttgacttccataacgagtgccggggcatgaagttcgaaaatgtatcacgactggtcgaccgactgaaagatacattgaatgagttcagctataccatcatcgcagacaacgatatcctgcagacccaaaagggcatcatcagaaccaattgcatggattgtctagaccgcactggtgttgcccagtgtgcattcggccaatgggccctcgagcgtcaattggaaaatgaaggcattgacattgacattggtggtgactcttccacccaatggttcaatacagtctgggcagacaacggggatgccatctccaagcaatattcatcaaccgcggcccttaagggcgattacacccgtacacgcaagcgagactacagaggtgccctcaacgacttgggactgactctttcccgctactacaataacatcgtaaacgacttcttctctcaagcctgtatcgactacctcctaggcaacgtctcaacccaagtctttgacgagttcgccatccagctccagaccaccgatccaggaatctcagtccaaaagctccgccagaacgccattgacacaagctgcaagatcgttattagtagcccctctgaagaattcctaggtggctggaccatgctcacaccccgccaacctaacacccttcgcaccctaccattcgaagaatcagtccttctcctaaccgatgccgcagtctacagctgccgcttcgactgggagaccgacaaagtgttgtcctttgagcgcatcgccctctgctccatcgagcgcatccactacggtacatacgtcacatccatattgacagatagccaagccgacgaggcgaccaacgtcggtctcgtcatagtctaccgcgacggcgacacaaacaccctccgcgtgaacacccggtccctgcagagcgatgtcgatctcagcacgctagagactaccgccagcgccaacagtgaatgggacctcgtttcctggctgcggggtagcaagcgtgcgacgacacggtttgttgcattcaagggcctgccactgtcaagtccggtcgctagtccgcggcttgggcctactactggtactgttcgcgagattgatcgcattcgctcggtctgtttggatatcgagcgggcgatgtttgcgggtcagggtgataaggctgaggcggtctctgtggttgaacagtctgatattatctctttggcggatgcgagaaagaggactgggtggttggaatatctggtttatgaccttaagaagatggtttgggcgtgattgctcttgtgatatagaggtgagttgcgggatttctcttccgcctcttctcttacatggctttcactcccaggttattggatcttaggtcattaacatctctttaagtcttttgcatatattccttagcattatgttgatagtattggatgtgtcgtaactgtcaccgatctcgaaaacatatgatcaatagaacagacagtttggaactatttgcttagggatttgacagtaagagcacgttagtatagtatcttagagataggcactgaaattattactgttctacaatatatcacccgtgcactgcctggtcaacatgtcacattttggcggtgtcagcttcaacctcaacttcatccaacattctaaccatccactcccatttccaggctgaaattttgcacacacatatcatgtgaaatgcagactatcctttcttcgcatctccttcttggacttgaagtctacacctaaacggactgaccgcctaccgtcttcagcaatcctttttttctgcccgcagcacatacacccctcagtctgaggtcgtccccgacaactgatctgattccgaccttactgcgaaatctctttggccaattacttctcgtcttatttctggatctgccttagcggatcgcagatttcagtcttgtttctttgatctggggcaacgaagggggcccgttcccacattttcggcggggctcctgtgctactcgcactttcgacctacatctgtcgcatcgagtcttcacctaagacaagatgaattggcaacctcagcaagagccattgaggcagttggctcgctaccttcgcgattcgctcaatgggactaaccttccagcccgagcagaagcagaacaggtaccggcgttccctttttttttttttttggtcctattgagcttcctctcaactgcgatcgccaatacactaccccaagatggaaactaacgttggaatcttttgttaaatagatgcttgcacaagcgacctcttctcctgattacgtcaattacatcacctatatcttttccagtccgcaagctgcttccctggcgggaattaacgagaacgaatggcctaccgttcgattttccgccgccgtaaacgtcaagacgaagattgctcttgcttacagcacgatatccccccaaagcttggcatttatcaaatccgcggctctggttacactgcgcgacaccgaccacaatgtctcaaaagctgccggtaacattatcaccgcaatggtgcttcacggaggccttttggcctggcctgaaattgtcaatgagctgttgacgactgtcgctaattccaacggggatgtgcccatgtcggctagagaagctgcaatggatgcgttgtacaaggtctgtgaggacaaccgcaaggttctggaccgggactatcagggtcaacgtcctctggatattatcattcccagcttgctacaattcatttcggtcgacagttcgcgcattcagattgctgctctcaacgccatccatgttttcttgccattcaaacctcaggcattgatggactcgctcgaccagttcctttcgcaattgttcaggattgccggtgatgaaaataccagagtccggcaaatggtgtgtcagtcgttctcccaacttgtggagactgccccggaaaagttggccccgcatatggaaggattggtcaactacatcatcatgcagcagcaatcccaggatgacccagagcttgcacttgacgccgccgagttttggattggtgctggagagcaagagcaattgcaggccgaattggcgccatacatgcacaagattatcccggttcttcttcaaaacatgatctacgatgaggaggaggtggctcggttgatggacgagcaagacgatgccgacgccgaggaccgcgccgaggatctcaagccacagtttgccaaatcgaagggtgatcgtctaaacatgtccaagccaggtgaacaaccagaaggctctcgcatcatcgagcaacagacagacgatgaggacgacttaagtgaaggtgaaatcgaggactcggaattcggagatgacccctcgggtaactggactttgcgcaagtgctctgctgctgcgctcgatgttttctccaccgtttaccatggtcctgtctttgaaatccttctaccatatttgatggaaaccctgcgccatgagcagtggccgaatcgagaggccgctgttcttacattaggcgcagtcgccgatggctgtatggatgctatcactccccatctcccagaattggtcccttacctcatctcactcctcaatgatgaccagcctgttgtgcgacaaatcacttgctggtgcttggcccgttattccggttgggcagcccacctccgcgatccagctcagaaagcccaattcttcgagcccatgatggaaggtatacttcatcgcatgttggacaacaacaagaaggtccaagaagctgctgcatcggcatttgctagcctggaggagaagtcagaggataacctggcgccctactgtgagcccatcttgcgccagttcgtagcgtgcttcaataagtacaaggaccgaaacatgtatatcctttatgattgcgtgcagacgctcgccgagtgtgttatgaacgagctggcgaggccgcatctaatcgagatcttgatgcctgccctcatcggtcgctataactacatttctgatgattctcgagagctcttcccgttacttgaatgcctcggatatatctctgcagcctatggcgatgcatttgcccaattcgcgccgcctctcttcggtcgctgcatgaagattatttacggaaacttgcaagcttctattcaaccgacacacgccgcggctgacgagcctgacaaggacttccttgttactagcattgatcttcttagtgcaatcattcaggccatcgacccacaaaagagcggcgagcttgtgagtacttcacagccgtctttcttcgaactcctccgctactgcatggaggatccaaactatgaagtccgtcaatcaacatatgctttgctgggagactgcgctattagcatcttccctcagttggagcccttccttcccacccttaccccagttttgatcaagcagcttgacttggatctgattcgcgatgatgatcgtcacacgggcttcagtgttttgaacaacgcgtgttggtcctgcggcgagatcgccgtccatgagaatgccgcgcttgcgccctacgccgagcaactataccaaggactctttgcaattatcattaacgaggaaatcatcgattcggtgaacgagaacgccgcgatggcgctgggacgattgggattctgctgcgcggaccagattgcgccccatttgagcgagtgctctggacctttcctgaagtcaatggacaagattgatttcacgcgtgaaaaggcttccgccttcctcggattcaaccaggtggtgatgaagaatccgcaggccatggagtcgagcctcctcgactacttccaggctattgcctcgttccccgcccgctcactcgcacaggaagagtaccgggacatccaggtgtctttccaacaggtaaggttattttccctagttcagtcacatgccactaatcaagatgtacaaataggttcttcagggatataagaccttgatccctgacttcagcaacttccttggccagctccccccagccgtggcccagacactacgcaccgtataccaggtctaagtcgaacttggtgattctacttagatcttgaccgggatgtcgggttatgtccacttctgtctcgaatcgggcgcgattaggttagggaagagacacgagggatacccgggggattagtaaatagggggtcagcggccggaatttcacgttaatagaaagaggagggagaaagggggggcaaaatcatgggaaggagcatctgcgatttagctgtttttttacgttacatctcatgattgcaacaggggcacgcaagaccctttatgatttctatttcgttgactttgctttcttcttgattcttattttgcattctttgtgcatagacatcatcaaggcagggctggctcataggttgcttcatttttttttgcttttttgttttctcagcgctggtttgggggttttttgcgtggcatattcatatccccccctttagatagatacctagatagataggtcttcgtcgttaatgaagatctcaaacaattttctgagagtctggcatgtagagtttggcatgttgcagtatcctatagtttcggaagcatcttgttgagacgtttggcgctctcctaggtatcttttcccgctatacttaacatgctgtctcactgactagaataaatatccttcatgtagtaagacgtaaaattgctaacaagtatcattgtgattatcagggttgtccttgacggtgctaggttcgccatacccgttaatccagttagtatagacaaaccaaacattactactccagcaaactaaatatagtcagttacctagcattatttctacgttagcacttttacctgcctctagaacaaagctggacagtgccagcgaatatcacacctattccgtccacatatccccggcccccaggaaatcaagagcacgtaccaagatcgactcgctaaccttgaacagggagtggatggaaaaaaattaagatcagcaggaccctggcaatctccgaccagctgcaggtttatttttggctagacagcatgcacagctagttaaatacggagtaactagtcaagtactttgtagttacttgctattaataacctagtagatgtataccacatccagcatatacatcaccaaactgtaagaatagaatcaagaataaacaaccaagcatccaatagacctctgctgcccatacgattcccatcaagccctaagtcccaaccaaacccaccacgaatccttcattccttcatagcatagtaagcagcaagataaccgtagcgaaaagataaataaaaagataaccagtaatatccaactcccggctctcgcctaactggcgcgttataattaactcggcagtcgaaaccaacaacaccctccccccgattggccgctcagacaaaaaccgcccgaaataccaagacgcgagcctttcccttaactactctttttcacgaactcggaaccgaccccaccttatctcaccctgggatttaaataggtgtcgatggcagaccgttgatgcagggtgcagggtgcaatctatgtatgtacctacaggtaccccgtagcataccgggcgtttggttcttagtgctgcgtagtgcgccattgccctgggccgtgtgttggtcttgttggtctgggctaactaattgactatgcctcttgcggcttgggatggtgtgatggaggctattgtggactggatttgggactgcttataggtccaggtgttgtgttgtgttggtgcgaaccgggctttctttggattatacttcgtacatattaatcctctcagggtcttgaaatgcgtttagtgtttacagttataggttttgactttgtcgggtattattttcagcctcagttgtaatattctcttggtatcttgtccacgtccggggtacgcttgcctcaactcagacctgagacctacctgcattatgcatattaggaaggttaacttccaaatgacgggaagctaagagttaaaccagatttattcccttctctaaatcacactttgagagaggcgaaacaagaaacaggaaataggaaacaggaaacaaacaccgcgcctgccactagaaacattccataaaattcagacggccatctacattcttgatacagtctgccagattcacctcactctcttgcacgtttccctggccatcatcgagttgcgcgtgcagaatgggattgttttcggggccctctagcttgaaatcaacgtcgcgtgcacattttgagaagtcgtgagcgccccaagccaatcgtcctattgattatatattagtattgaattagatatagataatagtatggtatggtctttcggacataagggaaacaccatgaacagaacgaacagagtttggatgatccttacccttatttaccccaatgaatccatccagatctagctctgaatatgtcgtttccccgcccggtttctggcagtaagcagtgaggatgtgcttatccttgacattgatgccatttgatgatttgtggaagcccatgctggaatggaatatagtaatagcgggtacaggttgataaatgcgacaggctgtggtatagtttgaaagtgaggctcattatatgcaggaatggcaggtatcagattattgcctctaatgacatcgatatggtgtcgatcctactgtggccatttggaatggcgaatgcgggtggctctgccatcatggttttctcattatgataggtacccggggtaaggggttgatagtataacagcgtaccccatgtcagagatgccgaggaacgattccttgctgggctactgctgtgtctaaaatagagtggtctttacccaagtggaaggtcataatgatctcatgcacacctgctgtcaacctcgcgttcacttgtagctgtcgggcattagtttctgtccggcaagaaggagcacagagatggtacgatggtggcttgggaacagagttgacgctaaggactctatttggttgggattttatatctccaggcttcgttacttcaaggttaccaagactgggaatcaagattgtcgatcttcacgtggtatgtctcctaaggatggagttttgggtttatattttatatttttatctccacttttacagcgaagaatgtagaaatatatttagttaatgcatctatcaacatgtacaagtacattctatgatccatagcccattcctccgttagatcagtattgtagattgatctatgatctacaagaaatcccagtcccaccagtccaggatagcccaagtcttggcagaatagagttggttagcgtgctgcactcccacgggctgtgtttctgggttagcggaactggggacttcatgattcaggtgatttcgctttttctggttggggcacttggattccaaggatcgcactcttctgatatcacggggatcgcaatgttggcaattccacagagggagagggtaagcgaagaggaaaaaaaaaagatttaaatatcccctcccgtcaattccgaaatctgacgcaaaacggttagcctaaaaagagaccaaatccataaatcaataaagctgatcaaatcaaagaaacccactcgggacttttggcccccaagctataccaaggttggcctgatgttgcgacaagcgagactgatcgctgctgattggatctatcgcattctgtgttccttcacatctgcggagaaattagcgtcgcccgaacatttccggtggcccgcacagcgatcgccattggatcttccgaaagcctggaaaggaaggcagcgtattcggctctgcactgtcaaaccagtcaaacaggggagattgaggatgatgatctaatctctgtacgactaactatggtgccacgtgtgagctaaataatcctttggagtaatcatcggcatggctgcagtacatcgtgaaatatagggaccggccccgtccagatcggaaggggcacacaccgactttagacattgacgtctgatccccagaaaacgtggctctgcggtgttctaaatatgcatacattgaacctctaggtcgggactgagtagatatacttagatttcttagatgctgactcggctagaatgatgctgttccaagcgacattcctaccgttttggactcagcccaagccctggaatgaatacattccattccatatatgtaccaggttctctttttatgatcatcctgaatactcccgcggaaccatctcatgaagtctctctcatccctgcacgccagggactagaccatcgggctcccaagacctattgcccacttcgggcttattgacgtatgctgtacactttcaggctcgtcagacatggttcccctacgttccagcccagtggtaacttcaccggagacggagatagggtggttccggcctggggcaacgatcgcaataggtcaatcagtctagggtgtcaggataagggatgcgcaaaaagaaaaatcaagaaaaattgagatgtgcggtgatcccgagagactggtcttacacccccctggtcggggactaaacgtacacctgttggttccaatccccaggttcccagtgtagagtttgtttcttttttcttttcttttcattttcacacaaatacctatattgtataactgttgtacagaatttccttccggtccactttcggttgtgatcaccgaggtcggcgtttaatcccccatctgactcatagactccgacggagtacggagtagaaacggccgacttccgcctgtcagctaagcttgacactttagcgagactcgcactgcatggggaatggcgtctacgatagcgcaaggattgactcccctcttttcctaacggggttaacggtgtcccttgacagcgacccacaatccagggtccgccagatccaaagccttgcgaggcaaaggggtcgatcggtagtacggagtatatttccctgcattgtgtattctatcatttgaaatctggggtctggtgtcataggcccctgcgtatatcctcttggctgggactctgttctctggaacgcgggatgggatttataaaaagaaaagtcaaaaacagacggatagatgcatcagcttgaagtcacccgtggaccttttcttatttgtaatcatctatgacctgcaatgctggatatggtatctgtaatctgtagaactagaaccttagtaactatccaaggctagacggttcctaccaacagctagttcggctaaagaaattataaataaaatacaaataaataaataaaaagaatatccacatggattgtgcaatgtcgaacctatccctgctctcccatgcgcctagtggatagcctagcctatagggccgctatataagctacccatgtggcccacccgacatgactgagtgctatattagacggtccgttttagggttttcttttcttttcttttcttttcctgaggtatttcctattttattttctattttcacttacgtaggcatttttgattattctatttattccttctgggcttactgcccctccccccctgtacccagaggctcaaaatctcgatcgtcagaaatgaaaaagaactagaaataattaggaaaataattcgagaatccgaaatttaaatccgtcagatcatatctcttgcgtaccctggactaatacaatttcttcccttctcctctacttcccccatctcccctcttaatcttcactttaagatctccagggctcgtattctccacgtgcttaattcaacttatcccccaaacctcaaccgcccccaaagttatttttggagaccctgttggactcttcccttcctctataactacagggcagacgtgcccatcaactcgttcgctacaacaccacctgtggagtccttgactccagtcccggttctcccccaagcaacaaggccaaaatggtcggtccaggtggcggtccaccgcgcaagagccacaccaagtcccgtaacggctgcaaaacgtgcaagagaagacacatccgatgcgacgagacctttccgcaatggtatgtgctgcaatccccaccagaatctccctactaatcccatccagccgcaattgcacaaagcacaactgccgctgcgactaccaggatacggttgcctcgcaagctgggagtccccccgccccgcgtcagggtcctgacctcctcatgtcgccagagatcgaaacgcaaatagacaattggcatcgcactggcgtgcctccgtatccggagctcttgcagtgtccgcgagctgggtggtcgggcttgtcgcgcactgatttgcgcttgattcactatataattggggcttctattgacttgcatcgtcgagggctaagtgggtgcacggtgtgggcgcagaagatgccgaagtgagtgctctttagcttggttggtggtctttgctgacgggtgcattctatagtttcctcgctattgcgcttggcagcgagttcgtcatgagctcgatattgagcttctcggcgtttaatcttgcttttcttacgcgagacccggagaccaaacagctggctttcagtcgtagactcacagctcttcaaggattgcaaactgctctagggtctttctcgaaggaaaactgtgatgcaattcttgcggcttctgtccttctatcatggcaggcgacagaccagtgagtgttatatgtaatctcccttggatcccgactaacaccaggtcagtcaaaattgggcatctttgcaacacggcatctccagcgtcctggaatccatgcatccatattggaagcaagagtcagatattgcacagtcgatagaaacccaacgaagaatgagcacagatctttcaatgcctggggtctacaaagcccccgacgaagacatgatacatttggatcaaactatccaggccctacgaatgacacagaaacgcgtttcccacaaccccgagcactttgaacgcctaggagacctcatcaaattcacccagaaattccgcaatgatttccctaaccaaacaaccgcacaagtattcgaaagcgtccaacccatccgccgctggttcttctggctcccagcatccatgctcggacgcggcgaatcagacatcagcgccctcccaatcctcgcccaattctttgccgtcggcatctctctcgacggctgcttcccagagatgggcggcgcatacctaggcgccttactcgtcggtcccatagaagagatctaccgcataatcgctacccaccacgccgcagaccccttcaaccccgatctgcgtctacccctagaactcatggatctgccccgcggaatcgtcgcccgccatcgcagccgctgcaacctcccctggtccccccgctcatccgtcgacccttactctccgggcccacccagcccttttcaccataatctgcacgagtactcgctcgtcgcctcctcctcctcgcctgcttccgcctccacttcttacgccgcgtataccccacctttgcattcccctcctgccgtcactattgccaattctacctttcccgtccaagacggttatgcctccgcaacccccattccacattctctatacccgccctccccgcattctctgtacccgccctccccacagctcatcgatagccaggaccccaacctcggtctctcggatatgggtcatagcaacgcccatcatccttcgatccctcatccagcggcttacaccccaccgtatggcgacgggctgtgcgccagcttaccgcgcacagacggcacactcggtctcaatatggaggtctatccacagccacacccgtttgaaatgccgggcttggctgcgcccacttcactttggacctgattgtctgctgtgctgagtttatttatacggaaagaaaagaaaaaatatggaaattctggactaccactctgaacagagttggtcagtcagattctggctattgaataccagggaattcgaagatataatgtctctcatttttgaaaatatgaagtctacggaattatgttctacgggaattggacctgcagaacatgtgatttaccttggatcattatacgagtgtttcgtttcacgacctgactacctatattcggaccttgttttgttgagcatgagcgttaatgtgtgatcttgtctctgattttatcggtttggtttttatacccggttacaattgcaaactgagggaattgtcccaacctggtattttgattgatatatatatgtagggtattgatatatgtactccactatgggtactgggcctgggcctgggactgtcgttggctgttgaaagacgcgaactagtcttactcggagttctcaatctggatatcaccgcatgaaggagcgattgaagtacccaatcttgcaaatccgggattttcgagccgacagctcccaacagctgccttacccctctatgtggaagtcgtctattatctttggagtattctagtacaatcatcattctcactcagtttctttggtattcgccatgtcatcgccagaaccttcgcaggctttcggcttatcacaaggcttcactacgaaactcgccatttccagtctcattctcttagtacagcgatctcccagcgcgggaaaaaagaaaatgacaatatctgacgccgattaggtcctctactggacctcaattgcattctacaatgtatatttccacccactagccaagattcccggtccgttgctcggacgcgcacctctagtatgtctcacctagtctatcctgcccgaattggacaataactgatccccaaaccagctatggcgagtcaaacactcaatgggaggaagattccacgtcgccatcgacaaagcacacaaaaaatacggtatacctaacccgagccctcacacaaaaaaaaaagaaacagcactaacaaatcccatcatcaggcgacatagtccgcgtctcacccaacgaactctccttcgcctcagccgaatcctggaaatccatctacggccacccggtcgggggaacaatcacaatggtgaaaagcgagttctacgagatgttcggatcaggtttcgactcgctgtgtattgcctcagagcggaaccgcgcgttcattcccgtatgcggaaatctctgacgccggctttctcgacgaaggctcttgtggagcaggagtctattgtgcagagttgtatagatgggtttattgagaaggtaggggaacgggggacgcgagaggaggggttggatttgagcaagtgggttgagatgttggctcttgatatcgttggtgagatggcttttggggagagttttcattgtattgagaatggtaggtcttgggtgattactgtatgagatgagatgttcaatggctaacgagttcaaggaaaacctcatcattggagtgagatggtgacatctcatgtctttatcgccaccctggtcgataatcttcgccgttatccgctctttaactatatcggggttttcattctccctaaactgacgttttcggtacggaatcggcattcgcagttcagtcgtgacaaagtcgcgcggtgagtccacattctctgttgagtgctcaagcacataggcttatttgaatacaggagacttgagagtcagtcatctcgaaaagacttcctcaccaatctcgtcgacaaggtgaagaacggcgaggttgggaaggaagaaatgactgcacatgcctctactctaatgttagcagagttctttcccttaccgtccatgaacctaattatattacagcatcgccggaggagagtcagtagcgaccttcctagccgctactacctattacatccttaaaagcccatccgtgcatgcggagctgtgcaaggaaacctgcgccagcttcgacaatctatctgatatcaacgccacggctgcgcagcagctaccgtacctccaagccgtcatctcagagagtctacgcatctacccgtctgcatcccagggctttccgcgtctgagtcccggggcggaaatcggtggcgtgtatattccccgtggggtaagctaaataagtttattctgtcactgctggcccaaggataggagttatatgtatgctaatattcgatctcctcagacggaagtctacaccagcgcctggacagtcacccacgatccacgatacttccacgacccttatgtcttcaagccctcacgctggctcgatcccgcttgcactgatcttaaagaagctagccagccgttttcccttggtccgcgtggctgtctaggtcagaagtaagtttctactctattggatacctttcttcacttaagtattttgatggtaaatgtttactaatcgacattgcagttttgcatacgtggaaatgtgtagtattcttgctaaattgttttatacctttgatctggaattgctggactccggactagattgggaaaaggagagtaggatgcacgttatgtggtggaagccgtcgcttcctgtaaggttccgagctagggaaaaggtttcaaccaaggaaatgtgagcagaacgatagctctagtgatatttgtgcctgcagacaaacagcctccagagccagatagccacacaattccataggaatctacagattattcgattacttctgactggtataacgctgcattcgcattctccaagagaggcacagcaactctcacactatatatatgtctgtgacattgaacacaaggaactaaaattgatataactactgctatatgatctagcataactatcctacaaccttaaatagtatgttagtgcatcgtcttggcgcatcctttcaaactcaccctaatcctaatatggactggggatctgttgcagatcataagtttacccctgaatcccgatctgagattgtgcgactctgttacacccgccgatgcacactaagcatgtgatcggttacaagattcagagtgggctctattagggttcgggaagcgggaagcacggttagtagatttgggtttgatactgctccaccgagagatttgtagcacagggcagaggtagctgtgttacaattcctaccatccttgcaagcttctgagatatgatatgacggaataaactagttagttaggtaacgaactagtgagttatgatgagttatgagtcattatgagtggccagtgaagatcgcctgtgattggtcagacaagtatagtaggagaagtatacttcatgttcactatcctcttggagtaacttctgaagcactaaatagtgtcactgtgacaagcctgtgttttgagggctataccatcggaatgtcagaccaaggcgcagacctgagcgcgggctcttcctcccctgtgacgcctagtctgcagttaaaagaacccgagaaagagattctccagcgccaaatacacactccaaagtgccatatgagtcgcctaggccttttatatacatgtgcaacaacctatgaactacttgtcctggccatcagctcaattgcagcgataattggatagatgggataaatcttctatttgcagcttgttacgaccccgagggtcacttgcacaactggcccgtatgggccgacgtacttgctaagtaagcgccaggggtatatacacaccgcgcacatgagatttagaaccttagcgattagtctactgaattgtataacccacgctagggacctccactctaattcaaacctccatttttaggatacactggtagctagtcctaacattctaatcgcttcatttttacgaattagaccactggaacccataagatacctcgaaatacccgtagcagaagccgggtgttatagggagatatacccctacctgccggttaagaaaaccaaacgtaggatttacaaacccctactgagataggggccatacctgccaaaagagccgctcctataaaagagggggctgcctaaccgataaaattggcaccagctttaagctgggatcttctgggctcgacaatttccctcaaagctcaccacgaatgtagagagtaaaattagataactagataaaggacttatattacttatataaggaagctagatatattataagaatttacctaaaagctaagtagctttagaagaataacttaaaggagctaaaaaaatagataaccctatactataggctataatagtactaggaataacccttagagagggttagtagaagggctaaagtatattagtatataatatacttatcttagatatttataagggtgccctaataggggttactagaattctaattaatagtagggctacctaaacctttattagctaaagataggtaaaggagaatctagaagatataaaaggaataccctacttagtaaaggcgattaataggtataaaatctacttatatagtagctgagagattactctttagcttatagatagtattagaagatatagtattataaagatatactataaggctatcgatatattaggatataatatagtcttagggatagactggctctatacagtaaatctagatatcgattagaatactagctattagttatactataagggtaccctattagaaatagagatagtctccctagaagagtttaagaaggaactatatctatatagtatcttttatatactttatattagactactagatctattagaagaaggtaaacggttaggagctatatagatagataacctcttactataagtatatagagactttgtagatatctttaataaggctctagcttcgatcctactagaatatactatatataattatactatcgatttagagctagggaaagtacccccgtttaggtcgctatacttactattaaacgtagagttagaagtcctatatacctatattaataagaaccttaagaggggctagatctaatatttaaagagtcctataggggtacctattctttttatactaaagaaggatagtaaacttcggctatatatagacttctatagattaaatataattactattaagaaccactactccttacctttaattagcgaatctctattaagacttactagtataaaggtctatattaagctagaccttagagatata

SEQ ID NO: 162 - DNA, 168620 bp, Penicillium roqueforti
  misc_feature (5048)..(5222): n is a, c, g, or t
  misc_feature (67666)..(67900): n is a, c, g, or t
  misc_feature (102399)..(102725): n is a, c, g, or t
  misc_feature (131702)..(131799): n is a, c, g, or t
  misc_feature (140180)..(140407): n is a, c, g, or t
  misc_feature (161892)..(166602): n is a, c, g, or t
cacaaaatacactcgccttaccaccgtttttccgtcagaaactttcctattgtctccgatcgccagtcttgttacatcagcagatggttgaaaattcttcccatatttgtacggaccaaatggcttccgtaaaaaggtattacctcctattatccaaggttgtatttttcatcactggcggttgtgtaaaagttgtcattgagtaggagtagtgatatagtctaaacatatatacaagaatcaaacgtctaccgtttgtaaagagagataagggattatagcgaacaaagagtatcaacttgaaataaaacaacgctatctatcactctgtcatctatcagtctatacatcaacttatcgctctggtaaattcaaccggaggtttaataaactgcatgaggccgctagtcctttcgcgatgtggcatagagaggaccagaaagtaataactcaaagtatggaggaactattaacggaatgtaaaagcattatggtactcaccatggtcaacagacgttcactatcggtcgtgtagctagctcaccgactatctccattaacacatatttgttgtaccataacactagaatatctttctcgcctactcaacatcctttgactctcaaaaatatcgctgctattcggatttcaggtagatttgatgaaatagagctcttatcagtgtcaaagtcgagaattttgagtgctgcttggtgatggtgctgttgtagcatataatcggtgtcatgtgcctcatacagagaccccgagggattttagggctcggcataggctacgtattccttttcacttatttctggcgagaaccttgcctggagttttatggttgcacaattttatggtcgtgataccaggtactagtaactagtaacccgggtgggtctttatcaaatgacagctggcgcgaaatcctggtcgtatctagggctcttctgttcaagggtagcagcataagagttgtgatcaacaagtgggggactgcaggagacgtgtgaaatattgtataatgatgtagccgtacgaccatgacgaagacttacgaaatgtctaaggaaatccgcaccatatattggcccgttaacatctttcaagttcggaattggaaatgcaattcacgctactggaaagcagagctgctcttgccagaacgaccagatcatcgcatgggcggtgcttccccgccaagaggggctgctactggaaattagcgcaatacgatatcgtgttagggaacttacatttctcagagacttgattgaacctgccgtctcggtagcggacaaaaatcccacagcagcggagtcgattggccatcgatccaaatcattcacgccaataatgcctttatctttgtcatatttctgcatgagccgcatcgtaataaacggaagggccgcaacatatgcggcttcggattgatctggtgtacaatctacacaaaagtccaaacacgctgtgaaatgtgagacagataacgcaaggatgggctaccaacaaacctatcttcaggatcccgtcaataccaagtaatatatcgtcacaggccagatattgatgtgcaaggccagataaagccaaatagcgggcaccgtcgagaatctaaaatgtcaggacaactctatcggacagccatgacggacaaacctggcatataatagatcccaattctgcctcgctgggatacacagatggaacggcaacaacatgcgcgagagtcagcggcaagtcgtcaaccaagaagaacgcgagatcatcgtgcatatagcattcatataaggagagaacgttcgtgtgttcgagacgtccgaatctatgaattaatctgcgagcagtttcttgcggatatgtccggattgctaccatgcgagatggacgggtgcggcgtgtggcgattgtgactttaccagcgatctgataggtaatgacttcccgataggtatcccacggcgactcctgtcttacaatcaagacagttgcaatgttttcgataccacacaagcggggcagacaaaggctcttaggaggccccgtgacaaccttcgatctactgcggcggcgaagtctgcttggcttcgtggtggtcgccatccggctttcgtaggtggtggagtttggcatcgagatagggggctgaaattgtgctttgatagtgccaaggtcacatatcatgttttctttgaatttgttggttgccatgataagataattatgatcgcatgaactttgagagaaagggatattccatcgcttttatatgcgaagtgttacggatgggactttcatcaatgataggagaccgtagcttcgcccgactatcatatgatgaggcttccatgccacggttgtcacctccagacagtcatcggcatatgtagcttgttatgactgatatctcagcctacataaaaatgagacccgagctaattgaagcgtaacatattggcctcccaactgcctcaggatattgttgctagtagcagctcattttgctatgagaacgttgttctcgaagagaatctagatttcatatgactggcagtgggaaggttaaaagaaaatgggagctactcgcttctttcccggtttttacatacacacacacacacaattcattaacgcccggcggctgagccgaaagggcaactatcgctaaactactatacatgtcatagtatatacaattctgtgactcattggagcccatacacaagaccttggcgtatttgtcattctcagcatgcagtgtcgcagcggatgctcgtgggttagtaagttggttagtagactggcttgaaggcgcttctccaagtgttcaacatcctatcttcggcagttgaagcgcgtccaccgtgaatagcacgaggtggttggtgggttagattagaatgaaagaggggtgatttatgttcgtcggcggggttaagtggcctcgaggcggcctgtggctatggcgaatcgtattgaggcccgtactgcctctaagtttggcgtccacttttgatcgtcggaaggcgacttccctcccaggtaaaagggcagatttcctcggtgagtgtcggtacattgtagcatatccgtccggtgtgtggtccacttccgacatcgaaagaggaagtgctccacagtttccttagcttgtccgcacgcacactgatccgtgtcggccgcgttgattcgatagaggtatccattcagtctcgccatgcccgtccggagttgggctagcacggtcgcttccttccatgacaagggatcatacagctgtcgcgtgtgttttcctgggagtgctgcatctactcgtttggcgtgctttccgacgtccgctggcagggtatttctggggactgcttgagaccgtgcgagattcagcgtggttgattttatcctcggggcgcgttcttgcaagagggcatcttcttgtgtcgcggctctagcctgttctttagccagacctagcagcttgttgtcttcactggcagaaacccagcggacttgaacatggtttccgtttctctgcaaccttttaatcaacttgtatatccgacacacgaactcctggccagattgttgtcgagggttcctgagtgtgagaaccgccgctttgttgcttgtgagcagtgcgatcgtgtagtctttcagtcccgtcgccgtgctcaatacatgtgccatggctgccagttccgcagagaatggattctgctctgcccttacagccaaggtgatggatagcgctttgtgtttaagcttccgattccgaggtggtcgcttctcgatggccactccaaaacccaccagctcgtttcgtgcagagctgctaaccgcgacctgcatgcacccgcccgcttcggccagggactcatgctgctcatcaatgtcggtttgtacgcgttccgcccacggggatagcgtgaaggggttgatcgtttctaatgtctccatgtcgatgtgcttgagcgtatcggctacgtgatacagtggtgagcggtggtatcttctgaactttctgatctgatctgtacaccggcgaagaggattggtttccggcaaggtgtggatgtctgtccacattttcacggctcgtttccaaaatcgacgttgtgcagtagccatgtgagcctccgcctctgcgacactagtcgcgactgtgagaaatgtccccacaatggcttgcgcgcctactctttggactcggttgatcggccccatggctttatccttgcacgcgtgcatccagacattggaggcgtagtccactactggtgctactgtcgatgcgaatagctgtcgcgcggttgctggggagaggcctcggagtcgccgaagctccatcgctgcttcgagacccttggacgctgctctcgcgatatgctccttgtacttaagtctcgtgtccatcaagacacccaggatcttaacgtggtctttgggtaccaccgtctgccccttgatggtgaatggctcatggtccaatttacgcatcttgggagcaaagtgtatgatagccgtcttgtcagcctcaaatgtcgctccgcttctcttttcccagttgagtgcctcgttgatgatggcttcaattccttcccggttactctgcgcagtcggaccggtcacccacgcggtaaaatcatccacgaaagcgactgctcctccctggctgtcgatctgtctttgcacgaggtctgcattgaaaaacagaaatagaatcggagacaggggcgagccctgcggcagcccagcttgtggcaagctttgagtctcagataactgcccgttgatcaggatatttgccgttcgttccgagcagaaggccccaacccaacgaagcaagacctccggtatgcctcgggctttcatcctctggatcagtcgttctttgcatactccgttgtaggctcccttgacatcgaagctaatcaagctcagcactcgtcggccgcgccacgccgcatagatctgctcctgcaggaacaccagtgcttgctctgcggaccgctgctttcgagccccaaagtggctcccccggcggnnnnnnnnnnnnnnnnnnnnnnnnnnnnnnnnnnnnnnnnnnnnnnnnnnnnnnnnnnnnnnnnnnnnnnnnnnnnnnnnnnnnnnnnnnnnnnnnnnnnnnnnnnnnnnnnnnnnnnnnnnnnnnnnnnnnnnnnnnnnnnnnnnnnnnnnnnnnnnnnnnnnnnnnnnnnnnncgcgcccaaagggggctcgtcgggagcagtccatgcgtctccaccgcgtgcgagatcctctctgcgatcaccgattcgagtatctttccgagtgtcgcaaggagtgagataggtctccatgcctttgcaatggtgtagtcatctttattcggcttcttgagcggtatgatcttggcctgtctccactgtcttggcagtgtgccctcttgcagcgaggcttgaaagaggtcgaggaccctgtgcttgactgagggccacgtcatcttccaaacgatcgccggtaggccgtcttcaccaggtgccttccacgacttggccgctgacagttgccgctctatctcctccatagtgacggctggcatgtccacaggcgctctttgtggtctcactccttcctcgtcgatgttctctggcaaaggcgggaaaaacttggatatcaattcctccgcttgctccttgtgatcgttcgtagtggttccatcggctctgaggagctgcggaatcttcccgaacgcggcattgtctcccgacttgaggtacttggcggctttccagatgttgtcgttgtctgcgagaaactcgttccagtgcttcttcttttgtttgcgaatggcatcgtggtattgtttggccgcatcctgggccatcgtttcgagccgggggacttttcgccccgcccgtcgctcggagcgagcacggtttctccagtgcgtatatatatgacggagttgagtgaggtcagctgtccaccatcgcttcgcatgtggtgatggtttcgccctcggggttaaagcgtgtaccgcttcggacactgccaacatgagtcgatccgttttctgctgtaccgtgccctccgacggaaggatggctagagcgttctgaatcctggcgttaatctccttccatggtgcattcttcagtaaaagtcgctcttggtgctttgggcccgaccactgggcgtcgaacacggactcaatggcgcagtgatcagagccgtggtctgtctcgagtaaagcacattttgtcatggagtccgtcagattttctgaagctaggacgagatcgatggtagactcgcagtctccactttgtccgccgccgtgccatgtcttggtgccgcgtttaagcaagctactgagcgcaaactcattcataaggtcaatgatcggatccgcttccccttgtcttcccagcgacacctcgtctccaccccagagttgatcgtgtcggttgaagtcccctaccatcagaatctccaccacggcgcctgtctctcgtcgtacttttgtgatcgcatcgtgtaaatgattgcacgcatcgtccaaggctgagatattgcctccttcaacgtaaaccgatgccataaagatcagtcgctcggggagcctgaccatcgctgctgtgatgtctggagactccacagggacttgctccgcttcgacttctttgttgacccagagcatgctccgaatcgcccatctcccctccctccaggtagagggcaccatctttgtccacttgtgatgccccattggagtggtcaagagccggccttgaatcctcctcgcttggggttcctggatcgctagcgccaccgcgttttgagtgtcttcgtcattcattaaactctcgtgcactgcaccctgcttcctcacgttcagctgaattattcgaagagaattattcatgacgtgatggatagagcttccggcagttcttgctgtacgattcgtgaggccctccgcacggtacacactttggaaccggttggatacagtcgctgtggcgatggccctctgtagcgcatttcgcgcatttctgggcgttcttgcactggaatgccttatggcctatctcttggcagttgtaacattgtgtcggtcgcggtcggtgttcgaagacactagtcacaccagattctccccccgcgtggaaaaatccgtcggccaagagccttcgcgcgtcgatgcgtttggtcaggtaaaccaccattgaaccgtaggccttctcgctctcttttctgctcagccatgaaatcttggctacgttggtctcattctcctcactaaacgctgctgcagcctcggttcggacctcaccgctctcgtctagcacggaggtcttgttgacgctatcgactttgatcgggtagagctcgtcacggaggacccgagctcccgccccgattttctgttctgcaacctttttgaccagctgctgttcatcctcatcccggcaggcgatcctgatccggttggcgtttttcgggtcaacggtaacagcgcgacagcgccagtgcgcgtggccctctgttaactgtatctctgcctcaaccgctgctctgaccgagcctgcggaggtcgattttgtccctttttctgccatcttcgaggtatctatcgtgcaaaatagcgtgtccgtaaaggtggtgggtgtcgtgttcagcgttaaaagggaccgtatgttgcttgggtaactggacggcggagtgcgcgcgacatctgcgtaggaaggagagcctgcaacagcgggaacactgatttcctcgcgtaaggactggatttcgcgcaggatcgcatcgtggttgttctgagagcacgtctcagagtggcattgcggtgtcgtgtttctattcgtcagggactgtagctcgtgtcggacctccgcgagggcggtaccgaactgttctctggttctctgaatttcttccttgtgtatttcgtcacggagtctgatctctcgcctgagtttggcgatctctctcaccaaaccgccgacgtcgagctcttcgcgctcggtcgcggcgtcgtccgaagttacctcgtcacgccggtctcctagctcaattctctccttttgctgggaacgcgtctttcgtcgatcagtgtcaatttcctgctcacgagcgtagttgttcggtggtcgagtggtgcgtttcggtctcgccagtcgcggtggcgaatcttcgcgttcgtcacagtcgggcggttcaggggttcgcatcgcggcccgtcccgccattggtcacagtaactcactagacgcgctcgaaatcctgatgaaagtaccgagagacaagctacagtacttcccgaaactgatacgtactacagtaccccccagaggtacaggatgggtttttacatacagggaggatcgaaatcagtttcaccagatgcacacagagattatttctcgaaccctgtcatgaaacacgctatacccgttacagctactatactcttgaacccctcacttggcagtattccagtacaggcgtaaataactgcttaaaaatagcttctgtattagacttgtaaggtcttcggggtttctagaactttggaatagcaaacttcccaaaaaaagattcccatctcgtccacatactggccgggcttttcgaggaggcgatcgcatagcgattctatcatcggaggtgttacgttcggtcgtcgacctactcgagctggggtgctctgacatttccgaatcggcgaaggttattactgattttgataattgaacgcttactacattcaacagcttgagctatttgcgaggtagtgagtgatttgcttaatattatacgctatatcatttcgagcttcgagagggagagtcttggcgccatgttggggaaatttagataactagtgaagcctggaaatttaatagtcagcaactccatcttctcacccttgctcacccctctgctcagtgagcaagggaaatgattcctggtgaaatgtctgggaaaggccaggtaataggaaatgcacgtgacctagtgaacttgtaggagcctggcagcacatctcaaagctgcggacctcagaaaagatgattaaacgaaatggcgcatcctccttcggttgatccagtacttctcagaatgtgcactttaattgctgaatcagtgacctccttgagcgatgagggacatatattttatccagaaaatgctggctgattatacgctcgatctgacttttgagatcgggtcgtcctgttcctgggaacgccattacccgccccaacgtggagggagatcgttgcaaaaccgggttgaaagcggtgtggcgagtagaaagcacacttaattcatcttgctgagcacgctagagtcacatgatgacaaggctgagaaaattcccctctttcagttcgttggacacggggcccactgagattctcgtcatgaaccacattacacaaaagctactactcaacgtcttctgctagacgagagagagagagtgtttgaaacattgcgcactatctcgtacgtccgggcattctggttagtcgagcttaccacccaccatggctgagagttccaaatctcagccagagcaatcagtgttaggacagaacaaagctggtaccgacacaccaccatgtcgaaagcgacttcaacatagtgcatatactattggatgggtgtgcgcccttgtaaaggagcaaaccgcagccagagctatgttagatgaagagcacgaacctctcccgatcccttcaaatgatcttaacacatatactcttggctctatacgtggccacaacatcgtcatagcctgcctgcccaatatggaagccaactctgccgcaaccgttgcgacctctatgataaacacttttcttacaatccggttcgggcttatggtagggattggcagcggaattccgtcaaaggtcaatctgggtgatgtggtggtcagccaaccggttgctgactattccggggtagtacaatacgatatggggaggttgggaaggggtgggcagtttgtccacacgggcttgctgaacagacctccaaacgcgctgctcaaagcgttgaaccggctgaaatctgatcatgagatttatggatcacaaatcaatgagtatctagatgatgtggaacggaaatacccgaaactggctccaaaatataccaggtgtgacgagaatggaaaatcatctgagaacgaaaaggagaaaaggaccgaaagagaagtcagggtgcattacggcctgatcgcatccgggaacaaagtggttaaggatgcgcaatcccgagactccctcgataaagcattcggcgggcacttgctatgcgtggagatggaggcagctgggctcatgaatgacttcccgtgtgttgttatacgagggatttgtgactatgcggacctgggaaaagaaaaaggttggcaagaatacgctgcaaccgtggctgctgcgtacgcaaaggaactgttaggatgtctgcatcccagtcttgttgatgccgaggatccaggaaaggctacactagaaaatggtaagtatatacctatccaaatagatcatgtgcaggtgtctaaagctggagtgccaacaaatacccaagacatatgaaacgaatttggaaatatattctgactgcaaatagtgagacaacagatcgaaagggtacagcagacagttatggactctggggactccgactcatccagtgacaacgactcactgttttctgctcctgtctctgtacctagcaccagatcgtttgactcgggaaaaggtgaaatgaattcgttgttgattgagcagtttgcacacttgctgaatgaagacggagatatgctttcgctacttttgatcggcttatcaagagaaccgatcggatttgagaggatgcgaaacaattttcggagactgctgaaacacttcgcgaatgacctcaaggcggatatccttagcgaatcgcaccgagacctagtgagatttgtaagctcatattcagttatgatcactcgtgagctctttgccatggtgtctgtcgacgagcagcgaaagctcaatccttacgaacgcctagcccacgagaggaaagtggaatcctatcttcaaagtctacaggacgccgctcttcagactagtgaagtaatcgaaggacttgatcctgatgatgaggacagtgacgaaggatccgtagcagagggagccaacgaggatgagccgtatgatggatctttgcaaaacctggatcaaatgaagcactttattcgggaaagcgctgcctaccaaattcttcgtcgtcggcttgaagagtttgttcaaccctcactaagctcacagtttcggaatttggtgatcaagtggtcaaaaccagaaaataagaaccatggcgatgttgctcggtataaactgcggaaccttgtcacagatttacagcacgtgaatccctctgagattcgattcgagcatgacgagagcagttctcgattttctatgttcatcagccaatatcagcatttaattgagcgctggaccggagagtcttgggactggtggccgttacctcgctatccgagaccactggccgaatcagagacacggttacggtggaagtgtgtgagtcatcaaattatagacagccctattcaatatagatacagccctaattcaccaaccaggtgtgtggcaaagagcgatgggcagagatgccaaacacccttgtcaaacgcttccagtctataatcagaaggcttcccgttgacagcttggtaacccaaattacgtcgcctcctccaacacacacttctaatccgaacccttgcaatattctaaacagcaatctaatttctaaccaaacttcccatcaagatcatatagtcgagcagccggacggttcaccctccaatccttcacttcgtcctcgaccctcgggactcaaggttaatatcgcggacttgagcatcactcggcaacgcgtcctctttctcgcaaagcaaggcggagattatagactagcacaaatttgcgttagcaatatgacctgtcataccttcttcagcacaatgaaaaaggagtattttcgcctgagaggtgtcttgcgaagctggttcagcgtttggagatactctcattgcgacttttacaaagtaagtactattgcctgtgatcgtaaggtattgttaaaaataaaaatcacagttcgagaagttcgatgaccatgagtttacggtcaggatcaaagattcattccctgaccatgcgaacaccgattacgagtatcaaccaagaccgatggacaacattccgcctatctcagagcacgaattcacgaaacgtttctacgcgtgtcacaaaccaagaccactacttcacctgcaccacgaatgtaggaaaccgggggcacattcctctgaaatcttgcagttcctcccaaagaaaagaactgaactagaagaagcaggcaacaagcgcgaagacttctgggggatttatgcgcgcgaaaaaatcagcttacgttggatcattctatacaattttggctgcgtttcacctttgctagcgttcttcctagcgtggattgtaccccatgggcttggcacagacttacaaaacccatctataccgctttccatgatgattgccatgctttctctgttttggagcttgtatcttagcagtctgcaattcggaaggtcgcattaatttgaatattttgtattcgatgagatattgcctagctcactcagaaagtccccgctctgagcaaagacggccttgcctgaacgtccatttaccgaccactcattagaaaattttgaaatttagagggaaaatccaccacatctgcggcaaccatatgagcatagcctcgtatattcttgaggccgacgagcaccgatcttgatcctgcggattataaccgatttttcaggcaattcctgcttatgccgtaatttcctagaataaacctgtatatatattgatttagtaccattcaagcgcagagcttagctcttaatcatggctatcctcacttaaaagagatcaaataaaacaatgacggaagtggtctactgtgcgagatatctttaggaatgagaggtgtagacttccgcaaaacccaactttcgacccagtttcgacccatctttattcgtaaatatacatacactcaatttaaaagcccgagacacgaataatacaatgtttcaatacaagtcagcatttgaaacgaggctaagcaagattaagattagcgtgtttaaaaggagggtttgagaaagaatccttgtgagcagatggtgaaactaatttcgatccatcctgtacattagaatgagtctagggtttctgcagtctgctttggtgtgtgtagctttcaggtttatatgtcagatcatagggtggcgcatgttcctgcttcctttatcttgagttatcaattgcgtgtgagctctctcgaaggagaaaattttccccatctcggtcggtttgcaagctccgaatttttgaaatgaatgtcttcacctcatcccgggcccttgagcgaagcttaaccacggtgtagagtagtgcctgacgtaatgccgacgactcgatgctgtaagatttgcgcctgcggtcactgctgggatcatatatgcattggcaaagttttgccttacagttcgcgcatggcagcgcaccagaacactgcatcatattagcactggaaggaggaaattcattagcttctaaccttggtccttttctggcgacaatttgtacaagcaagagagacattctgtcgctttccacacgatgaaggtgatgtctgtagttgggagagagaggcctgcaccatcgggcggagcggccgtagggcattttggcctgtcatactaggctaggaactgagggccaaatacgtcagaaaatattattcagtgcatatgctatcgtaaggaggtgggtgatgcgctggattaaatagccaattcgcagtgcccgttctctttgtttacgagatgaaaaaaacacattagcagctccgttaacacaaaggccgaaagctcacggtcattattgagaccagtcccatgcacattcccgagctcggctgtagcgattgaaatgtttatcaaacaaagaaacacggcggtactgattacattgagccctgcccccggcttggcacagatgcatgctttgattggacaacgcctggcagtaactgaatcacctcggtctattccaaagatatcacaccatcggtttgtcgtacagaaaatcatccatttcccttttggacttctgtgttacgttttacgacgtccgatgcaacgatgagaccgtatggctgctataacaatcagagttccgaagctgttgtccaggctagatataaacgaaattcctttgcaaagattagccagctattatgataatgaaggttacaaattaggtgtaactcaccattggaacttacgctatccaatctacactgatggactgcaatattccacctggcagtccttgcacaagtcgctactgtgggactttactccaactttgtgtgtagggatgacctagctggatttgagtccatttcctgatacaatgggccactcgatctgcatgcccctcattcaggataaggcaattgctccgacgcaggtgtatatcgctgatggtactgttacactctcgcatcatactgtgctgaatggtacaatgttataatgaatgcataagttgtgctggaccaaccgccagactcgcacaccgggtacgggatacaagaaacctattctgttgatattatattcgttcgtatagtcgcgagcttcgtcaggcttgtgaattgaaaagaagatcttatggtctccaaagcaagcacgacgatggagagaacagtacatcaaccaacgtttatgcggcttgcgccatattatgagctaggactgataacatgcaaggacgtgtggggcaatgtatatagcagttacgatttccactgcaacgatggttctcctttcctggggcacccaggcagcgacttcccgagaattacctaatgtgtatttaggtttctaagggtttgggatgaggcgtatacagccgccggcgagactttgttggttttagcggcgggtcgtcaccatttgacggctgttgatccatacattgcttgactttcgagatctcagcatctagcgacaagactttctagtttatcttaactgtttccaatcgatgatagatatggcctcggctcagccataagaattcgacccctcccgacctccacctctattgagttgctactttgcaatttcagtgatcttcctctaacgatatcttcctttacatagagcaattttctatatctaagaaacgggccaggactaccctcattagacaatccctcaccctcttcttgcaatttccgagattcctgacaggtgatgtctaacgggataatcccagtcagcaagtacgctagtaagtcgttcgcgagaagattccaatgcctgctcaaaaaagtgcagttgagattgctgcttgtcgtggagaatctgaaggctgtctctctcatgtttcaggtgcacaccagcctccttcaatatctgattgttttgctctagcttctctccatcgaagtgcttatacacgcacgactcccacacgcgtcgatagagcccaacaagtcgagctgctggaaaggtgaagttcgaattgtcacgttcgaggtctgctagcaccttcaatacgggttgaagaggttcggtcgccaagatacgtcttgtttctgcttcctgctgcgaaggggagagctgcaacagttagagatagcattccaagccactcgtgtcacgcactgatagatagacatgatcagaagcttcctgtgaattgcctttgtcattgagggttggcaattcactgatctgctgatctccctccttttcctggcttagcgagctgtttggggtatccattttgccctcgagacaaagcaaaggggctggacagtaccatttctctcaatccctggtgtctcttatagagtatgcagacggagtgactacgtgctgagttttacaatcaccacaatagtcaatcaacacagctggactttcactagaatgtattttatttttcaacaagctgtttacagtccatgcgaggattatgatattgatcaacgagttagtagtggtaatctgacgaaacctcatggccttgaaatccagattcatggactttatggactttggccaatttggtcagctatcaacggttgttaaacgccagtagagctatacgttgatcatatcacaatgggtcttttataggtatcattcaacgtctttatttactgtttgattaatcagtcaaaaaagaaatgataagtatacagatatcttcactgctgacatgggatgccattggagctagaagtgtttcactggttcattgatcaagaccatgatattgaaacccgacccttcttccccattcgttaaaagtacttgaaacccatccagcagataaaacatcatggaaataatagtgctactgtataaagatacgaacaactaaatttgaatgatgattatacgtttaagatactaagttgatgcacggctgagtttaacgtggttcgagcaagggcgggcacctgtaagcgacggtgacctaacgtgccgtaggtaaacggacaaatccacagctcaatacaaccaatagaaaaccgcggccgggaagactagcctgtgtctcctagtaaacaaatcggaggccggtttggtgattcgaagtgatagttgattgaacatcatggctgattgaatagccataacaccgcaaggcctcattttagagcgctataacgggttaataccagtcaacgttccttacaggaaccgactaagcatcactatccctcagcataacccttacttggctctttcgctaggcataaaacttggcatcaaaaatggcatcatgacagtcacaacaaatagtggctataagaataagatatgaatttcaacagaccctacatagaaaaggcaatgtgcccttaagagctctctaccaagcaaagcagtgaagtaataaggcaagccgagaagttctggatacgtcctctgccccgctctgcaatttattcacttgactacgccaaagtcaagcaggcttcgcatctgaattacttaataagttctcccttttaatccagagctgggatttccacttgactgacattcatggaatacagtgaggacagcatgttcgacagtgaccatgagagaagtgattcgtagtcgatccactgtaccaccaatgtcagccgatcaaagagatatgccttgccttggctggttagtgtccatgtaacctgtcgaagagccaccgttatttccctctctagatacgtccctaagggaaaagcgcgaatcatcatgttacgggaaaataaacctcagcccgatctatctgaaattctactgatcctagaggcgatgtgatttttcctggtccacgcggattcaacgacaatatacgagcgcaaaaaccacgaggctatttcccgtatcttcgtccctggtttatggcaggcatatacaacgcgcgctctattgcgtcttccgtcctcactctcaccgccctcacacaatgaacggcggagctgaacctcagaccgtccgcatcgcaaaacattcatccaccataggacaatttaactgtcacaactgggctggccacacttctactaagtcggtcaatcggccggtcacctagcctgcagatttcaagggacagccggagtttgcgatgagcttgtatacgatatggcacgaatgatgactactttgagatcttttcaaaagctatactaactcgtctactaggatcaatacttactgactaggatcctataacaaaagaacaccctcattattttgtcctcgagtcgaatgcgaagcgaacaaatgtcttgtctgctagagattccctataccaatacgatcgcggcccgcttcccatgctggaccgaatcgctgccgaattgatcgacggtcgagggactgcgaacctgggaccgcaacccttccagtcgatcctttgcctggttgtcattgtacggagggactggcttgctgcgcccaaccacctgcactgggaccggcgggggactgccgacctgcgattggagcttctctgattcgggactggattcctgctcactggatatatcgggtttggtatggtcatgccgtgccatatcgacatgccatcgatcgccgcggtctgcgtggcctgggaactgcttctctggtatcgtgcatcgactcatcactgaattcctccgtgctgggctcgctgctcgtgttagtggctcccatgtccgcgacaccgtcaccggacggactgcccatttcctcttcactggcctgccaattgggctgacacccatcacacatctgttcagccttcccatgatcaccgcaatggcttcgccggtaaccgtaccatctaaatacccatccaatatgtatcttcgacaccgcggatgctccgcctccatatactgctggatgcgtcgtaactcatcctcgcccgtatcttgcgtgatatattccggtgcttcggtatccgcgggctggatgatcatcgccttgctgctttgcccatcacggcccggacgaccactctcctgcgcgtaatctatcaacgtgcgcggctgcctaacatgaatgatacaacggatgtcgggaatatccacacccatacccaatgcattggtagctacgattacgggcgactgcccactctggaacgcatccaacaccgtggctttgtcgacctgccgactgtggtaaacccggcaccccaatcgactggccaatatctccccggttcggaccaccggcgtatacacaatgaccttaccgggtcgactccgatggatgcggtcctagataatggctaataccggtggcgcctcgacccaacagatctcaaatcgatattccagacctacgatccgacgtaccatgcggtatgccacattgctacggtacgtaccggtgcggaacaactgcactttctcgcgcgtggtctccatccgcataaacaccctgtccacttcacgcggcggcaaggtcgccgtgacataccatctgcacgccgaacccactcaatcgacccagctgggccatcaccgaccggaaatccttctggtcgttcaacatcacgtggtactcgttgatatcgattcgctccaaccggtgctgcatacgctaccggttcaaaaaacccagatgatagggttgtccgcggtaagacattgcactcatttctgacactttcatctctggactattcacgcaggatgtacggtatcgtcaagaacatggattcgaatataaaggcatcaaaccggcgatacaagttttttcccgggggagaccacgaccgtacatggcaataattccattctccatctcgggtaagtatacattacctagtagagccacggtccgattatagaatccataattgccctaacccgagaccgtttattttatttttcttgttgtcttatctttctagaatcaaaataagaagaaatggattagtccaaccttgtccgcgcggacgagattagactgaatcggaaaagcgtgcagcgctttgacccgctctgactttgaagacagtcaattgtgtgcggccaacgcaaccaacgggcaatggcggagacctatactgattggcgttttctagcaatagtagcatttgcattgcgcggcgttgcgtcctctctgtcggaaaacataatgtaggggggagaaatcaaaagttttcatgtataatttagatgaggatagcgattggctactcagctagaaatagtttcatgatccctgttagccgaacgatggtctctatatgaagccgtcaaatccctgagcgcgctgggggatggttgttcttctgtataaaaataggttgcgtttatgagagcgtagaacagacagccgttaatacccgctgattgggtacgaaattgcacatgcaaaacataatttattatagtctgaaataaatcatattggtatttttcgccacaaccactctgttgctgatcacttagtcatagaatggaccgctaggaattgttttctagaattcagccctggaaatctcgctactgattcggcgaagtcatatgcagggtcttcacggtgtatcccacctttgtaaaccccttactctgtgataccaacgaggtaaagatacatttctccatgatgcttttgagtcgtagaacaattctggtcgcggaaatccaagcatgcatatcataggaggctaggcaacatagttttgatctcacgtaatatcatatatcgatcaaattgcgggctggaagagacctaggtggcaacatataagtgtcatggcatgactgccttccaaggtccaaaatcttttcccatactcagctatgtcgactgcaagaaacaacgccggtacctctttcaagtaccactccattcccaagcggatcgatgcggccattgtccatattcctctcgaccgtctggaaaaactgtatcccgacattcaacgcttcgcagctatggctgtcgtgttttccttccaccccaagagcccactcacgccaagagttttattgatcaagcgaaacggcaacgaaggctcatggggtaatacctgggagccaggaggaggaactccagatgaagaggacccgactatcctccattccgcggcccgagaaagcatggaggagacgcaaatctggcctttaagatttgctagcaatgctttcacgtgttctttctatcacagagatagaaagaccggcaatcaagtcctcatgcgccctctcggattcatcgccatcgaccatgaagtgacgcgagacaacggagagacgatcaaaaacgaaaagacgatggcgcaacgaatctggtccagcgggattcaacagccgctcggccaaagttctgtcaagatcagtgatgagcaccttgatcattgctggttcactgaggacgaggttcgcagcgctgctccatacgagcaagacactccacagggtccatttgctatgcttacggccaaaagggacatggttctacttgcctttcagttgttcagtcaatcccaaggccatagtttgccaccttcaatagatatagcacgctaggacatggcggcaaaggggaacttggcaaattgaatgagtctcttaggagccctcaaatgatggccacacagagaaagttcggtactttatttttggagagcattagagcggtaaattaccgttagcaaggactattgcagagaaattcactgtcccgtttcggaggaacccttccgaactcaagcagctttccatgttatgtccgttaattgtctcacgtaactcggtaactcatacaaaatattattactccatttggtcatagagttttatctctcaagagagcccatcttggaagcaaacgaacatctcacagattagacaatacgtcctggccatatatgtatgcacaaagctacactaggttgcctttctgttcgaatatgctcgtttttatcatggtcaagtaattgctcttatgctatatgcccatccgcacagttttgccaacatggaatctatacttacctccattgaatgcagtgcgagagctagctatgtaccctgtcatatgagcatgcctcaagcccttgaacagtatttagaaagccgtagctctgtgcttaaatgataagtcgacagcaaaacggcagtcctagctgatatgtacagatactgcaaggtcaagagctaagtactctaggagcgggagcggctctcctggagcgaactgtggtacatgcttaccacacgccgcactaaaactttctgaaagctcttataaggtaccatggtccccacacaattcctataccgttcaatctttcaaattaacttattattactactctcaacggttgacgcgagaaagcaaacggtgcttatgcccgataggtcctcggaggaattcgatatctgcacggtcacgggagagcactcgctactttcagtgtcgatactattctacttacggaactcggtggcgtcagaattggtaagtagatatctgagtataactagcgggccatattagcatgagattctgatggttggccatatcgcagtgggagtggagcatagttgccaaatcaatgcagccgagatggacgcagccactacaaagctgttttccttggctgaggtggtggagaggctgatcatgaagaatcctctacgatatcatagagcaccgagaaaggtgtaattcaccggaaaagctgctacgcgtcagccttgacctgccagccttctacgtcatatactcatcaatcagagcaaattgttcgagtaatgaagagatgagagcgaaatgaagatactggtgaatgcgaccaacaaaattactcaccataatctagagtcatataatcgtggtgatgcgtaaatgcggcgagaatccgtatcgtttggctggtgagaagacacgattgaaggtactatacgttttagactgcagatggtacagaatttggaggtaatccgtagccccatttgagataaattgcaggggctttgaaatacagctgtatattgtattacactaacgaagtggttgtcactaaacacagagacaaaatggttgaagataatcggacatgggcaaatctcacccgctttgtccgtaggaagagctgccctcgcatatcgatttcccaccagagcactgtttgaccctcgcggtttggaagatcgatcttgacactagggtgttgaaggagctggttcaaaacagcaggtgactctttcaccacactgtaccacagagcactctcgccatttgtgttcctccaattcacgtgcaaatcttttttacgcaacaaaatattggtaaccagctccgagccataattcgcggccgtcatgagggagagaaaccatcgtgcagcgcattcacatcggcccggtaagaaagcaaggtctttgcaaagtcgcaattgttgtttagcggcccagtgaagcgcagagctgttttggtacctgatattatattcgatcagggctaggcgtagcttgggatagaggattgagtttgtccgagcaagagcagaaatgtcgcctccctctagggtgcttgctatgatccaaagggtttctgttgggcagtcgagaatggaaatctgctcaattttgtcaggattcggaaggctcatctcatttcggctgttcataccatgattttgggcgatggatttcagtggaaagggagacacaacgtgctgctcagatgcttcttatcggtttcaaggtgacggtaataaatggatgaaagtaatgtgactaagttaagcgtttttgaatcaagaacctggcaaaggcgagatacgtgggaggggagaagcttaaccaacacttgcggtcaccggccaagcatcagtttccccctacctgccgacgtagcaatcgactagcggtcctaggaacgctgcctaagtttcttggattgtgtctcggttctataaagaccaagtttatatgagatggactttatgagggtgcgagaattgggaatctacgacatataaaagaagatctagacttagcccagtaaaactgaaagaacagcaccaaatgacatgatctaggtactgtaacggttgccaatctactgaagaccaattagttgaaggtttcgtacagctgggataaaagctattggtacagagacctcggagcgtctcaaccatatcctccggcatgccagtcttcagaccccgacacagatcatatctctacacatcccgtttgcttcatgtatatccctaacagcagcggaggaaactcccaggatgaacaatgcacctcctaggatacgcttcttatttcctacatatcgagaaacttctctattagggcctgattatgttagtaggtcagcgacctcacattgtgccttttcggccagctggcgtatggtacagcccaagcaccaacgattcgtcacagctctacgaggaatcctcagcgctttaccatgatcttatcagaatagagtcggtaccgcggagaacattttgattgctcctagaacaagagaagcatatcctgggagcttgtcttggatccacaattcgactgtagcaaatgaagaatctggcggcatatttgatgtggaatgattgatgaggccagcagatatcataagtagtgttccttctccatctaaacccccactagtacacgtatcgctgtccgtgatttcgaacatacagccagtacactcaacctactttacagtacccactatcgcaccgctcacaagcaccgcggattatctaccatctgctgtttcactacttttgaatagtggctatacattttgtataagaggcctagatcaacagtgtgacttcttcaattcctccactatgtctcttcgcccctgtcagccatgccgcagatcaaagattcgatgcaaccgtgaagttcctcattgtcaagcttgcgtcaagcgtggtagatcctcgttgtgtgtctatgaaatgagagtgtcagaccaggaacctgctcttccagagcctcattcaaagcggcaaaagaaagagcatagacgagcatctggcgagtatcaatttgaatggagagcttttgagccaggatacgaacggtcttttcggtacgaaacgagtacgaatgagaagatacaacaaatcgagcctgaaaaggaagcaaatatcaatcacttgcatcaaagtcattttgacaggggcgatatgacaccacacgagacgtcaccaaagagtattacagctacaacagcggacaaggattgggtttctcggccagagtatcgtgtggcagctgtggatgatattctcgaacggccacagagaatattaacatatcaaccaacaccgcgttatgcggagatgacccctccggtaatcaattgcaatctacgaggaaatttgagaccacaaggctgactctcaaaaaggcttctttgccaccacggccgaattttgatatgacgatatctgaaagacacaataatgacctacatacaacccaccaactattgttggtattgagctacctttttatctcttcaatgcttcctacggatgtaggggctttgtggaaggtcatatgccgatacggccatgactgggaagagagcttcgtcttgcagcgcagtcagcttcaaagttggctggtcagtgcccgcaaaattttgaccaactccgacgggctacacactatatctttggaagacatagaactccaaataagatacattctgtttatccttgggcaggaggcatcgccccactcgagctttctagccgaatgcttccaaagcgagtaccctccataccggccgtttggggtgagggcaagcgtcgcgttgatttgtcatgcctttgagggcatccggaccgatgaacttgagggatatgaatcgaaggaaatttggtctcgcgaccagaactttctgtcagtgatggcttcccgtctcaaggagtcgccactgtttgggcctgaaatttcaatgccccatctaaagtctatgataataagtcttcagagggctttccagtgtgaagaaatccgcgtgtccagcatgaattgtcggactctgaggatccagagccagttcgaagtattggggtattatagacgggcattcctagcttttgacccgatgctattgccaaaaattatggcttcattgaccgaaactaatgatattactaacctatctggccagcaccagcttacaaatatggagaggagcttggacagaagtaagtaaatctctgtttagattgatatggtgtttgacaatagtatagccaatttggccttgcgtctggccaacattatcatatccctcacgacagagcgcttggacgcagctttccgagatatccgcgagattcaggagtcaaaagcggatcaagtcgttgccatggagatgatgcacgtaaagtcattcgaagaagcatgcaattcgaacaggatccgtaagtcttagtatttcgaattggaacaggagaaatccctaatcgttgcagaacccaccattgaacccaccattgtccgtgttttccatgtttgaccgtgaaattacgagcggatttcggaatccgagtatgtctcttctgaaaagtccgagcgttgtatactaagaaaattgaaaattttgtaattggaaagagtatggaagccctacgcgctggaaacgagatgatcaacatggtttctagagatcaaaatgcaattgtttctcagtataggactagatccgattcttgatctgcgccgatgaatccttaattcgttcacataagagtcctatggtcgcaaagagcctccagcattagcggcgtgatactgtgcggtcggcctgctccaatagagggggccctggtatcaccgaactgtcgcaggttgctgcggatggtggtgacggaacgcgggctgcattctgcggcagcagcgatctaggccgtagtcagtgatttgctcaagatcatatcgcggatgaattctcgggtagaggggggtagatttggagccatattgggtcgtaggtgttcgtctcgaggtggtgaggaagggggtcaaggtggtaagttgcgacagctgcgaatattgtctcattaacgcttcggtgtattggtcttgtcaggtactttaggtttctattctaacgatctgcagtctagctagattgagactaggcagtttcaccatcgacctggcgttagggtctgggaaagttcctctatgtaatatggagtgtggcttcgaaggatgtctgaaagccatggacacggctggcaatccaaccccctaaggaatacagacagagtttgccttggtcatttgcggtacctcgcttttttctactcgaacatattctttgctactgatcgaaaactactgaactactgtaccgcacacttccataggaggacaaattcccgtgttttctgctgtttctgttaagcttactttattttttttgccagctagcttagggtctgcttccaatcatagggcaacccttactgttcgttgaaccaaggcagccgatgaagaatagatttcgaactgtgaaatgcaaccaatcatgctagtgagtaggtaactaacatgactcaagtagatattttctatgggcgtaaaacacagatgctgttggtgttcagtggtttttatgttcaatgttgacataaacgttgacatcaactttctaacaccaatcaccacccgtacatcgccaaagatggttatctgagaatactcagtgaatgtatcagcacgatactaccaatctatcggggacgaggccaaaggccccggtgctcctggaagcacaagcaagactccgccagccatctttcctactgtagcttgtcgcgcggctgaatcacccgcaatggcaacccccgagatatcggaaatgcacctacctcatgtttctattcatgaccaacccaaatctggcccccaaattgctcccgggaatgcgctttaaatcaattcgtgaatcaggcagcacgtggatactgtaactggattgaatcatcgttgattcaaatgacgcattggtctacgtaccgtggttgaggcaacaaatcaacatccgcagtcctcctgggagccggcactgattggtaacccgcgaaaacttgatagtggggatatctttcatggtggacatcaaacatagaaaagctcacgattatcctatggtggatgctattatgccttctttgctccaacaagttgctagggctgcgcatcatggatcacgagctgtcacacgtatcaaagaggtccaataccccagacacagaagaacataatggacttacatggcaaaccggtatcgttatcttagatccctttcttgaggaatccatcggctgacaatccatctccatggaggcaatgaatcggctgaaaacttccgtcaggtcgtcgaccagattgtccacggaaattgcgaccacacacgccaggttttacagccgtcttttaaccagtccactggctctatatccacagaggtagccacttctgttgctagctcgaggggctgtatgataccccaaagcgccataaaggctgaaagccaagccctacccccactgaacgcgggaaagagagtagcggacttcccaaccttcccacaagagcaacgtcaacgctcgtcctccgcctctgaaatacacggcggctcacaacgggcgacccaagaaatgcatcgaaagacatccctaaccacaacaattggtagaaaattgattatcgatacaatccaatacctacaaacgatatccgaccgcatcttgatctccgacaccatcccctgtacggagtgggccacgatgcatctcgccatgcaatttctacagagcaggtacgaagatatcattgcgggggaagagatggaatcaaacgctgtgtccgaatctactttcccaccgacacagccagaagagaagtgccggaagtgtactgctgcggatgaggagaagctatatgattgagaagctggctataatttgctaatacagacttctatttaccaaggtgccatttccatcattttgatgattctagtagaagagatagactcgcaagaaataggaataggatttcacaatgatcgcgtcggaaaaagcaaaaggaaattttcttttgaggtacataaacaacagtagattttactatctacagggttatcgttcaatttcttttgggaagatgtagtatatttggcaaaatggagaagtatcaattcgaaataaaagcatgctatctatcggtctatgtctatcagcaatcagtctaaacattctatcgatctaaaaattcaaacacaatttagcgtagaactcgaaggaaataaaacaccgttcagtacgccgcaactgctgtttctgcctctgggagaattgagcctacaactggaccttgggctcttctagtcgccgcaactgtgtcctggtacacgtgatacaaagcttcggctatcgttttctgtatcgctcttgtgcgttcatccatattgtgccaaccctcttcttctgccctttcagcaatgaaatgttctttgttgagtatggcactcccgccgatcgagagcttgggtccggcctggggattgacggtcgattcccgactaataccagaggaagccgaagtgtaatgggtctcatctcggtcaatgttgatcggattggatagcgacccctgtcccgggtgcacatgtgcattggatggtggactttgatgttgtcgcggcgggaagatttgtatcgcaggtgcactgaggtgcgaagcaccctgtcgctcaggcgactgcctcgctgctgagcccagtgggaaaggggtgggggaccgatcttcggtgcgcctttcggcgcctccagagtcgctctgtagcacgcgctgatagcgttcttcttgtttattccagacttctttgatctttgcatatgcggcgcgcttgcccttgcagaaacgaatgaaactagatatagggatccaagaacaagaattttgcattttttgggtatcttcgactcttaggtccctccatttgatcttcagccaagtgcatggatcagacatgtatattttattcgggtctctttcttccgaggcaatcccgtagatcccgaccacattgtgttttgtataccgccaacttctgttccctggtccggttttgagcagggaaatgcgcaaagttgggtcggaaatgttgttcattccgtcattggtatatccgtttctatacttgactttgtatctggctccgtggcgaggtccgtattggaggatgacgaaggttgatcttcgtagtgttccccatccatctacaatcgcatcggtttcctcgtcatcgtctgatggatcaaggctcgctagaagttctgggtcttggagctcgtcatcacttcgaaaattcggtgacaggctagtttgattccgtgaatagctggtcatggaagggtgttgatgcccactcaagcttgatccggtttcagtctggtttgccaagccagtgtcaggcatcggagtatcatctctatcgctcggagtggcatccctctcgatagactgtatcactgaatcattcgatgggggcgaaagccttgccgtgtcagttgggtcactgtcactaggagcgtaatcgtatgcttcagacgagccatctgttgggtggtgcccttgtggaacagacttctgtacagccccactagcaactttttgaggagagatagtgttgttgtttgccccttcctctaattcaatgagacgagataatatctctttgtccttgtgggatgaggtttttctaactccactgtttgaagccatattgagagagcaggcctggatgtttccgtgaagagtgcaggcttttcgcggtagatggtgtctatttatgaatttccgatatcaagtcatctgtatggatgtaggaccaggttatcgactgtggcgtacaagtaaatgcgttgtcctctgattttattttctgtatttccgttatgaagatcaagtgagcaccaatttacgttctagctcgttgggatcctccctcagaatacagagactagatgacgcactttatgtggttctgatgagttctatagctcagagtttgagtatgctctcctttcgtaactacctcgaggttcaattttggacccgccactcatccgggcttcaaatcaagcccgcattttggtgagcaagagaataatcaatatatgaagactctagtctcatttttcctcatgagaacgttatttgcgacgatgtgtagcagggtgtcgctcgacaaacgcaaatatattgacctcaggaaccgattgattatattggtcaggtttcatattaaaggaccgcattaagccaatgaattctcgcaagatacaaattctacttgtgtttcttcgcccgcaggagattaggctcagacagtgtcaggtcatgtatctcgatcctgaaaatctgccctctttactattactgacttggccagaactctatgtagcagctcacatagatgctttttgctcttgagcaaaaatgacttcatataatatcctctagccgatcttcaatctactgaccataaatagttgctgtgtggatgtctcattgtccattaaacatttcgaggctcggaccaattttatcggatgattgggatcaatgatgaatattgaatgagagatattgcgagggaatggggtatacgcagttagggtatcttacgtacgcactggcaaaactggctaattcccaagaggagcacgttttggatgatctttgtgaggataggactcaggtatttgagcagaaagagggggattcataaaggcggttgacctgatatttatgctctttttatgtttcacctatgtcttagccttgaaataaatcatgctggcaccaggaacaacaacaacccgagaacgtcaacgttcattaataaatagcttcaacggtatccagatcatgcgcaataatatgaatggttactcaacacatttggctacgcaacgtctcaatatggctacttgaactaaatcccattacactcaattaatggcatgattaaagagcttggtctgttaacacaacttccaccactgtatgtcatatgcgtatgtagctccatatagctattatattgaacaaatatttgatctttccgggaatcacagcatattgatctggggaatcgattaaccaaaacttgacatatcaaattcctcaagacataccctgtcaataagcttgtttgctaacaacatccaacaccaggtgggtaagttcgtgtgttttgctgtagcattgttttgggcattcgatgcgatcgcaggacactacaggcattctggcagtctctagcttaacactgccccataatcttcgtgcaagccttcaataatccactgctgctcttcagcctatcatagatactctgttctcataagtacatagtcgaaggggagttgttttagtttacggcttctcggcgctcaataactcttacagcaaatttttgtttcacggggttataacagtcccctacttgtaggccatcaggttattcaccaagcactatagcgctcaactcgaatatttgagttttggtttactcctttcaccaattcggccaaaaggaccgttgcttcgctcattgccctaacgttagtggaagagagctgcgacccctatatagtaaccacatttctacgatagtgcttaaattgccgttctcgtcgtcatccataacgtgaagtaacagacgaccacggtcccttcacgtaaagaaaacattatttcccttttgcccaccaaaggctcaaagttctaaaaatcaacctttcgcatttttattttagcacctgttttcattggacttctcttgccaatcagccttacaagcgccaccttcagcctagcatctgtcaaaggctatcacttcctcagagcaaggcatcaacttacaatggctgttttgaaaaccacccgatccaagaattcatcgacgaggaaattgatgcgccaaaaacagtgtcgtcgtaagacaaatatgctgaaaaaggcatctgaatatagcaagatgtgtgatgcagatgtatgcgtaggtattcgcatgcgggaaaccggtcaggtgtatatcttgtcggcggatgcttcgggcttttgggcttttcttactttgcaattggtaagtaaactatatggcatcatctccaggcggagcgctaacttcccagagctcttattacccgactccgactgtgatgacagatcgtgatttgtagaaaaccagggaggagatagttttcagggagcagtgataggctctttatgctgtatactagagtatgcaaatgtattacaatccgtcttgcagtatgtttttgcccatagtcctttttgtgaaaaacagttgttgcttttccattcactctcgtagttggtatgtcgaaaagtacagtgtccaaccaaataccacagtagtctacaatatcattgcgggcttcatgaataaagcaggaagaagatcgaagcttgaccgggaagagccgccaaattgcggcagggaaaggaagatcagccgccctgtactgaaccatatcatgagatatacaccttacagtacacacagttggcgatcgtctgattctgcagtcacgtgatgagcgcagaattggggttcaacgttgaacgtaaacttcagcagacgcatgttttgcaacagagatatggtattttactgctggtaattcttcgatgggtactcgatgatgatcattcctaatcatcaagcttataactcagcccagagagccgtaagattcctttccatctttctcgccagcaatgatcaccgaatcaacatcctaagctgctttcgaccgcccaaataaaatctctagtcaacgttgtccgaacagccatttaggaaatgagatattaactcgctaatgtccagtattgcctatcctaagcatgtcccgccctgtttcaaagtttgccgaatggcttgccagagcttccatccaagacaaattcggtctgtgtgggctccttgcccttgtatgctggatatgctgtagcctcggacgcagattcagtcatttgcctttgaggttgcagcaaatatcctggagaagtttcttccaggcgccaacaccaggcgtgctccagtggctagatatcccatcatacttgcaagggggggtgcttgcagtcctactgattgccaacattattacaatcagccttcatgctcacacctgggtggatgtacagaagcgagccggatgcttggcggtcacacatcttattcccctctgctccgggttcagcttcagtcttccggcccacgtctactatgttgagcgggtcaccttccaatgggcccatcggtggctaggccgcctttgcgtgctgcattgccttcttcatgggtccatcttaggagtaaatgctcgcaatacaagccttggagctcccctcgccatcccactcctggtacgtgaagcgggtctgaggacggcggccttcctactcccccgcagtatgtctgactagaagtggctcacaatgaacaggccggatgtagtctcgtctcgatattgccttggacgttggctgcgatcctccgccggtggccgcaattcggcctcaaggtccaccatatccttgcttcgatcgccaccggcgcccttttctaccatttgatcgaccggggatcgtcctaccgttgggttttacttggtggtatctgcgccggatgtgcctggagtgtcgggacatgcctgcatactatgtggttccacaggtcgtggcgcatcacctctagacgggcactcgcgcggtctttcaaccagctcttatggcttgatattgtggttcccatggggtgggaggctcaaccggggcagtatgtacagctctggttgccacgcttaggagtgaggtccttcttgcagcttcctgcattctacgtggcttcggcggacacagtgcagaacgcgtcgggagcaccggccactcgcacattacgcatagtgacccgaccccgaccgggcgtgactggaagggtcgcacaagctgcggatcatgcgacgtacttgacgattcattttccggtctgcgtgctgggtccgtacgggcatccacctaaccttggccagtacgggaccgtcgtctttgtacttgaagacattggactcttccgcgcgttgccattcatacgacatctcgttcaagaaagccgaagccggagaaacacggtgcgaaggctagaagtcctatggcaagttgggctgaaacatttcagtgggtttccccccgttcttctcagatgctttgcggtgtggtgtacttaccggaatagaccatccccattgggtgggggatgaaatctcgcaaatcctcgaactcgaccgtatgtttgatcggaacgattgtcccgagcatagacaccgagatggccggggatttgatgtgagtgaagtctcccttctgcggtaactcttacaattgatcgggctaacttggtggcagatcctgcaattcactacacatatcctagacactcagcccgtggaccagattcgataccgcaaccgtacgcgcttaaagtaccattttcatgccatcaatattgccaaggaactgccacgccttatggatggtacgggcggaacgaccgcggtttcgggtatgagcgctccgtcgtttaccccttgatgatgccaacactaacgggtattagtatgcgcaagcaagccgacacgcgcagcagtacgccgcgtcgttcagcccagaacgagtggtaattgtcggttatttgacctgggtctagaaccctcctgcaagtgggcagacggtgactctttcgcccaagacacatccgaaacaattacagcgccaacagaaccctccaatactggcagagtatttgagcccgattggacaccgagtgccatacccgttgcacatgctgttgttaagcaagctacccggccgtccgggggaacctcggtggatcatagacgatcttgccagagtgataatccggcggttggagggcagagcgctaatcacaaaaggtgggtccagcagaaaatcaccgaaggcggcgtctaggctagccaggtatagttatagaaacaaagaagcctgcactggacagaggaccaaagtatacttttgcgagaaccaggaggatttttagcctatcaatctggttgccgaagtctgcgtgacattcgaatccccacctggcccaaccgtaccttctacgcaataaagacccgttccatctgcatttgacgaccgtcagatctaggtttgtagatcatgcctggacctttgcaaatcctcacgatttcttctcctagccacagagccgtaccagcgtcggaccacacccatgcgcgttgttttactgctgcttcttgcgtccgggtaacatcagagtgtgacagtagcgccatactctcgcgaggggagtgacgatcgacgagaagccagatcatgaggcttgatagctgcaatcttcatatggctgtccatccagtctcccccgaaggaatcacaagtatcgtcccgggtttggggctatattcatcgcgtttgtgccgccaggaggtcgaaatgttattgactacaaggaaacacaaacggcactttctagcactcgagcagtatagcgctagcaaatctacatgataaatcaagaggtggtctcgttggcaaaacggatcatccacgggcaaaatcgagtgtgaccggaccagagtgatacatatgaaaggagccgcagcctaggaaaattcatgattttggtccttatactctgatatatcagtgtccctcgcttgtcagtaggatttgagaggttctatggtcacggttgtcgctgccttgagccccgcgacgtggaagctactttacaggatgattcgcgttaagagtattctacgcgggggatgctgtaagaacaaggcctctagcaatttatagtctcgtattccgaagaacttatcattagaaggatctaatggaatttagatagatctcgcaaattcaatcatcaagatcgtagcattaacaactgaaagttcttcctcatcgggtgctgtattccccttccttgtactgtggtgttttatgatccgatggagttcctccgccgccattgattgcggtatcagccattaaggtatagagtagccagggatataagtgttacggtgagcgttgtggtgagtgctgtggtgagtgtggtgagtgtggtgagtgtggtgagtgtggtgagtgtggtgagtgtggtgagtgtggtgagtgtggtgagtgtggtgagtgtggtgagtgtggtgagtgtggtgagtgtggtgagtgtggtgagtgtggtgagtgtggtgagtgtggtgagtgtggtgagtgtggtgagtgtggtgagtgtggtgagtgtggtgagtgtggtgagtgtggtgagtgtggtgagtgtggtgagtgtggtgagtgtggtgagtgttgtggtgagtgttgtggtgagtgttgtggtgagtgttgagatacgctgttgtggtgagtgctgtggtgagtgctgtggtgagtgctgtattgagtgctgtgatgagtgctgtggtgagtgctgtggtgagtgctgtggtgagtgctgtggtgagtgcgtgagtggtcggtgaaggagaatacctcacggcgggaatcggaatccatcgaattatgtaagtttcttaaacagggcgttcaactttggaaatctatccggttaattacgtcgtcatcaactgtcatctgccagcaataaccactaatgtggtaggtaattgattagaatgaaggtgtatccttctatatagtgtattggatatgtcatttccgtaatagttctatccattcgataggtagacagtatattgtgtgagaattcgtaggttcaataagttttgcgattatatatatacacttgatgcgcgaggattaactgctttcatgtatcttgaatcacaattcaatttataaattctcccttattgatttccacttaagccgaatatattcattatatataattttagtcaaatcatttgaatatatgtcattctctgacatttacgtggttaaaaaattcaaaagtagtatcggcaagctgatcgaatgttgaaatgggaccgccaatttgtagcgcctcttggcacggaggaatatattaatccgaattccgagagatcatggcgcttacttagcgagtagtttttgtctagtttttcgctatgcttttggctcaaaaaaccgtggtccactacatattcaaaaaccgccattgcacttttgcgcttttgcgcttttgcggttttcgcactttcataacgtttgacgttctttaaaagctactccctagccaacaagtctataactataagagcactcacttccttatttcttaattctacattccagcaagtctatttctagagtcccgaggcatatttcaggctacaaactagcagatggcgactacaggccctcgttcaaatggctcttcttcgaaaagaaaatcaatgcgtcaaaaacaaggtcgtcgcaaatccaatttgataaaaaaggcacgcgaatatagtaggttgtgtgaagcagacgtctgcgtcgggattcgccttcggagaacgggccaagtgtttatcctatcggcggatgtctcgggattttggggatttcttgggtcacaactagtatgcaggcagaaacgagtcatatgaccaaggctaacttttctaggcctcttattatccgaccccattttttaatcacagatcaagacctggagaatgccgaagaaggcattataaggaaaccaagcgaggcaaatcttctagcttgaatactataattgaaattaattccccgggtgtgtcttgccaagactggcttgagtgcccaggggcatgtgatctcatttcaatatgattcgtgacaatgcaccgaatattgcgaatgctattgccaaagttgttcaagaggagaaagatgcctctattctaaggtcacaaactcagcacaaaaatcgtcaaagagttggggctcgggatattagcgctccaggcccttctatgaagctcttccttccctttcctagcatttggggcagaaaagtggaggggtgcagactaccaccgaatcgaaggccactgcggggacccactacagcgtgagtatctggctgagaactgtcgtgcgcatttcctggtcgcctctagactatcttaagactgggttaagcctagaacgattggactaggagagaagtagtttacccgtgtactgagtctcttgatttaccagttactgcctagtgacttttaaagattatcagcacaagctaaaagtgtatgaactggtatgcattcaggacaaatgagactaagcggaaccaattcaggatgaaaggattaattgactgaacaggaagacatgcaatctagggcatgttgaattacccttgggccatacgctgataatcggtagcaacaacaccatattctcaactagcccaaaatgactgtatgggaaagttgctagcggtaagttaccgcttcaatgctctgacaaccatcgaactgcgaaaataaagtgctgggttttcgtgtggccatcatttgagggctcctaagcaactcatcctgtttgccaagttccccctgcattgtcgccacgtcctagcgcactatatctattgaaggtggcaaattctggccttgtgattgtctgaacaactcaaaggcaagtaaaaccatgtcccttttggccagaagcatagtgaatggacactgtggaatgacgtgctcgtatagagcagcgctgcgaacttcgtcctcagtgaaccagcaatgatcgagatgctcatcactgatcttgacggaactctggccgattggctgttgcgtctcgctggaccagactcgttgcgccatcgtctcttcgttgtcgatggtgacatatgcctgggaatcccaagtaactatggctttgcaatcttttgcatacatatcctgttgaagaaagtatataatgccatactccgggtcaccgtagtaggacggacgtgattttcattccctgcgttttcgctatgccttggtcgttcgagtatgcactacatggctaggggtggcggaaaaaagtttgtatacttgcactcgctatatggccgcgcgcttggcagagatgagatcttcgaggatcgtcacgatggcttgccggctgttatcgcctgtgttgacgtcctcaaaataatgcgttcgtggccggttcgcttcttcctccgcttgcctgccaaacgccaagagcgcttcagtgccacttaattcttcccggaagcagtgttgctcggatgtcccgtcgttatccgagctatcgaaaataccgtttttgtccctgggtgtttttgccaactccgtgtggagtgtaaaaccccgaggtgaaacagagaaagaagagaagctcttaaatccgatttcgcgtattaccgttttatctaccctacagtatcctgtcttcacaatcaaaatcaaatatttctcttctttgcatcgagcttttccaccgcagcaagtcttcccattctttccaaccagaccctcaggtcaaaaattccctcgctcaaatccttccgattccctttaaacttgaatgtatatccgacatcgtccgcgggctccttcccatcagtatagcggatgcgacaagggctggcttggtagttttgtgtttcatatgctgcaagcctctccccatgttcaaccgttttgacatgatacactgcgccctcaatcacggagtctggagcatccaaaagtgcagggtattgcccccacaacttgcactcatagcccgataaacgtgctgggcgtagctcgggctcggtttccagctccaaaatttcacgaaccatggacgggtcggtcaacgtgccatagaagaaatagggcccagtcggtgcgtcgaacaaatccacgtactggggcgggttgggtgcttggaagaagtagtccgaaggggcggttctgagttttaagacgtagctggagattttcgagccaggaatttcgggtggtggtggtggtggtgggggcggactggtgagattcatctcctctcttgcagtattcgacataatcggagttggatggaaacaataattataactccaagaagtggaatagatgggtatacagttgaacactagaaagaaggtctattgagagtagtgctgagagcgaagtctccaatggccattgtttctgacgcctctagtgtccgttatgtaatcactgcggggtccgcctaggctctacctgtctatccacagtggtctgggctgcttaccgctcacgctagcagtagtgcacacgcaactgtccccagggatgtccccacaccaccagcgcttactgaagtacatcagcggttatctatatttactgttgttttagccaaccagagcctaaactttatgggtgtggattttccagtgagtcaacagtgtttcagaagggctcccgaggaatacgattgctcgctatagtggataaagaggcaattgatgagcgcaacaagcgcccgatggtgatattcttagttgtcggctgctttgcatggtttcaggtcattgcccacttccatgtagaaggctactataagtatgggcatactgtcttctaattgttatcacacactgggttttcactgatttgatcccatcatccttggtgttgtatgatcttcatcgccattcgtacttcaaaatcccgtatttcgtggcctattctgctctagtatattttgagagagcttcaatgtctcgaccccccccaccaccaccacctcctcccccgtcggcagcaggaagaccaaccagtatgttaaacgattttgtgacaagcacctattttctattctaacctataatgcacagtcgggaagagctctgtacgagctgagacttctagctatcccattggaagctttggcatcggagtcgaggttgagtttcttctacagcctcgtgagaatatcaaggcggccgatgatatcaggcaattttccaaggctgttgcatcttcttataatgcttacatggaccaatccgagcccggtagacatccacgtatgcataatgcgatcgatgaatcctacttagggcccaggtttgccgaatggtcccttgactcagattcgaccattgaaatgccgaagaaaggccgtgcgccatgtaggtactgtccttgccacaaataataaggtctaacaaaggataaacagggggactggagagcatttctccaatttttagggcacacgagggctctaggtggcgtcagcatgttgaattcatgtggagatttctacttgcggatttccatgtcgattctaatgctagttgcggcacccatgtacatctatcacgggtgggaggttactcattgaacgacctcaagaagatttgtcaaagcttgatacacttcgagccggcttttgaagccattctcccagaggaacgactcggcaatgaatacggacgaagtaattggctggacaacaagaattttggacaccaaaatttatcccgaaagcagagcattgccgttattgagcgagtttcgaccatgagggagctagtattactcatgaaccctgatcatgacaagatgtttggttggaactttctctatctgctgaacaatccccacggaacaatcgagttccgacgcggagcggcgagtacttcagtgcaagacgtctttatttatatagagattgcgatgtcctttctcgaggcctcggtccgactgggagatgtggaaagactaaagagtgtgcctgccactgtcggcggtctccagtggttcatccaagctgcgaagctaccagacggcattcctggattatttgactcccggtatcttaagctattcttcgctgggaagaatcaaagtgcattccgtgagccaaaaccgctgggtaatctttctccgtacaggctgaacaagttaaatcggaagaaggaagaagacaagagaaaaaacattgccatggtcaagattttgcaggagcctttttggagctgattaggtcttatggcatcaatatcccgatttatttctctgcaagtcgaaatattggcacttactgtcttacctgtttttcatacgttcttcttgattgatcattgagttagctttttgttacttctgaggccctttccagagtttaacgggatggttacataattgacattgtcctttaacgatgtcatattgaagttttaggtatttggactatcttccaatctatgatttacagcatcaaagcagccttttgtgttctatgtaagacgggcgtatacgaagcttgcggaagaagaggaggggaacattgttttacacactaaaccttcataggcagtaaagctcggcacgtactgttttacctgtgtttcatacgtttttcttcattgatcattgagtttgctttttgttacttctgtggccctttccagagtttaacgggatggttatatgattgacatttttctttaacaatttcatatatgctattgaagttttaggtatttgggctatcttccaatctacaatttataggccttctagcgagccccttcgcccttttgcctagttaccttctagcgctacacatagccaaccggtcataatcagtactgtaaggcaagtaacgcgctgcggaagttgttctcagagcctactctcagatcttaacctctaaccgcaaagcgcctgtcatccataaacgacaaaaaaagcccaaaatcctggagcatccgctgataagataaatacttggctgggttcccgaaggcgtattatgcccacacagacatcagcgtcgcacatcttgctgtattcggacttgcctttaatctggagatcaggcgagttggaatggaaggcgacccgctgactcattccaaaaatggcctgaaaatggggttcgtgggcgagtcgccagccatatgcaacctctatagcgctgccaactacagtattgggtcgccggctagcctagagagttaagcaagagtgggagtgtcggcggtttgaagtttcacggtttaggcttaacacccttttgcacacggacattttgaatgtggcagaatcgtcgcagaaatcggcggtcggtgaagaagggtggttagactcctcgattccctcacacccgtccataatcagtaagtctgtgtctgactgcaataatcgttggaatttgacatgaagctgaaatggcgatgtccagcggtattttggttcagaatgactcaaaatcgcgttgatctaaccagtgcgtacagcatagcaccatgcttcttgagggacatggcagggttgtgcttctatgcttctccaaagtggagcagggagtagcgtacgaccaatcatatcgacctactagtgtgatcccagagtcgttctgagaaacctccatagcctatagtcatatattctagcgaaatacaagtttgaaggacaagaagacccggaatccggatctgcccgctgaaaaaaacgagcacgcgtcctgtatctcgaatacgaatgcctaggcaaactgatgccattctttcttcagattcaatctttgtcggtcccaactttgttgaggagacttcctccgcattcctgtttgtcgatgaattggcatactcgcttgacaaggaacatagtgatgaagaaagggttagctctttttttagtccgggtatatacttgacaggcctgaaagagaaagcgaataatcatgataaaaaggtcgatgcaatgaatggcactcctccacactcagcacgacacgtaatagtccgaatattcgacatttacatggagttgactcgcgtacaccaaagccacaaacccacggacattttgcaatgtatcctgcatttgcgtgcaaaccgtatcattgttcctaaccctcctaatgagactccgtttctcggcctcctcctgtcaattcttcaagctgatcttcagggaagcacgacgccctaccgaccatgaggtattcaagaggggctcagcacagacaccgacgtgatgctagtgggggctgatttcattggctcatcagatgggcaagaggggtgggtacttgcacgtcctgaagaaccatgataaaatttaccgagtttgccgcagcctcagtgatgcgaacgtagtcaaaatgacacatcatgtcttggacatgatgcatctgcttgcttaccatgtatgatgctgtcgactaccacaaatttggtaacacgtcgcaaaaacccccgcacttgcatgcatgaaaatcaccgtattttcccctttcacctctgaacggtcaatcttatatagttcaaatttcaattttcaagatctgcaaactcaaagttgtggtccttagttcattgccaggactttgaacgaagtaaacgttcaatgttcggctcttcgccagcctggagatgccagagattttccaactcgcatcagccaaagagaaaaggtgatatttctcatggcaaaggccctgcgtgagctttaacgtttttgacatgatgatagacatgtggacgaaatcgttgtcttaatgtcatgtacagtcatttctatatccatttcagtctcagctgacacatgtgtatgacgtgtcaaaatatcgcacgcactagataacacaaagtacctctgtcaatatgagaaagggctcattaaatagccaagcttacacctcgctctccattcttcagtctatggagaatgactcgaaatatttttttgctcgcatattgtttttctcggattcaatattgaactgtgttccctgtaacaagcaatttcgctctcaacaagccttggagcagcacattcaggttgggcatcgttgtgagctttgcaataaatccttccaatccatccactcaaagcgtcagcacaccagaagcgcaaagaaccattccatggagaatcatcgccctgtagtcaaagctgcaccaccacaaatgccagtacaagactgccaggaagggaacgatcaaccacctgaattggggattggaacgaatggcgataatctgaatcttacatatactggagtacctcgagctgcagtaacaccggtcttcaaaatagcatgccgcctccgtttcatgaagcctgacgtcaatatgctactgagacgcatcgatacccagttagacactatggtcatctcagcgcttattgaagctgcccttcggctgttgccgcctgataactctcccaatggtagagccgaggcggaagaaagaatgcggcaaaagagagagcgggcgctcatccaagaaacgtcttttattgaccgaatgagagatctcggctatcaatttcggaccgagagagagcaaaaggaattacgacttagcccaacacctgacatccgatttcttgagccggtatcagtgaatggacattcctgctactggatagaatacaagaactactttgggtttaaagcgaatccatttatcacctcgaaaaacaagaagcaatttaggaaatatgtgtctgggttaggaccaggtgctgttgtatacaaattaggatatgaaattgaacacatagcaatgattggggtcgagacattccgggaggctgaatttctcaacaacctggagcaagagtcaaggctacgaaaatgagtgaatgactcataagagaaggttttgaatgttttcttggatgcatttcgcatggtaatatcaagcccgagtgatctaaatttctgaaacgctttttgagggtcgctcttaaacgtgtttataggcgaatatccagataatagtagtcaataactagatatcagtcaagagagggggggcaggggcgagagagttctagtaatgtccatttgtctctagattcctaaccattacttctgattggacaacgtctcatctagcgttgcagcgtaataaagctggctctgtatctaacgtaattcacaagcgagccggccatacaagccagccggccacctcgacactatagtaaatgcgatgtattctacatttaatctctttatttgtcgatagtcattgataaggctcactagcgttatatatcaatatcaaagaaagcagagagctattttgtgaccatttcaaaaattaccgaaaattacgttgctaaaagctagaaatatatatcatgcaaccacaaaggcatcaatcttttttaaacttcctagagatactagatatgacccaaaaagcaatactctacaaggaaatcttcatataaactaccgttgttgatatatcaagttgtaatttaccgcatttactatgtgttttggggtggccggctggcttgtgaattacgttatatcatctctagatatgccacttggctacttggtggatgaaaaactctaatgaatgacaaaagctcgaagatttgactcgtattggagcactgtaatgccagcagaaatagcatacaccgctggttccgccaaccaggcgctataatctcggcaaggtgcggggtagattggtcttcatattcaccaaccttgacaagtaatcgataactatttcagatttcttgggcttcgtgatggagtccaaaaaagcgattcaatttcctgagtaaggctcagtatttgccatgcggaaaagaaaaaatttaacaaacattagatttctaggctcggataccgttagcctttgcaccacatcgagctctgaatcatggaaaatccatcgaaagctcttggtgtcaaaatgcaaagctttggaatctgctttttctcatgacttcccggagcgttcatctggacagtatatattcaatcaaacaacccacgatactgtcgcacgtttcatcgaatgggcataccgggacgactatacggagctagatcttacacctatggaggtcaatcaaagatctcggccgagatcagagccttccgggccagctaaaccaagcgaagacgatcatttgcaagcgcacacattgctatgccacttgagagtctacatattcagcgacacatatttggttgatgatcttaagaacgtagcatttgaaaagtttacgacagttgttaaggatgtgggaaatccccaaaatttgaatgagcaacttgcaattattgactgtctattattggcgttctcaacacttcctccgcacgataagcttcttgaatggctagctcgatatgccgcttggtgcctctccagcttacgtcttcaagtgaagtttcatgaattgcttcagaaaatcccggcactcagctatcgcatgatggaaactttaagcccggccaaggaacctccttggaatataaaattgtcgaaataccgtgtcccctcttacgatgctcgcactggtgaggattttgcctatgaagactagtggaaagggggaagcatccacgatctcaagctctcatctctacaatttctatgatgtcttttcaagttctatagcaatatcacgctctcaggaaactcgcctaattcaaatttgtgagtgtgatagaaattgattctgaagatgctgcgggatccttgggcttaacttgcctattgtaactttactagttaattgatctaggcgatgcatccttgtaattatctaatctaatattctagtagacttaatgaaaattggattggaaagttttcatgagcattgaataagagttcggattggtcttgcttgagaaagacaacgtagtgggcatgttcacgatatatgctggcgatggatctgatttagttcagacagccggagcaaaaagcagctgccgaaaccgaccaaagtggatagcaggctcttagcattttgacaatttacctattatttatgtatattctccctccacggataggatcaaccaaagatgcgtcactccggcgcagcccacgcaatgccaattgtaccccgcggagcagatcagcaccgaatggaggatattcttgagtcaggtctgcaaatttatagtcgtcgcttcgcatgtacccttcgaccgaagcagcagccagaaggcgtcgtacagcatgatcatgaggcagattcaacgccgagatgatgtgatcagagttgataaaccaagtgtttcgatcaatgccgtagaattcggtatcagcgtcaagaagtatatcttgaatatatttcgccatttcggtttccaaccctagtatttcatacatgtctgcaaatcttaccagctccatggcagcagagatattctcctcacggttcttgatatcgaatctgacgataccacgatatagccattgaagaagtccttcgagggcacggtttgagataataccatccatctcttctaggtcgagtgcttggtcctgtgattccttgaaatggccgtttttgaacatttttgtgaagacaggtgattttgcacatagcaagtctcttgagattgcaatctcagcatcacttgtcttgactcggattttgatagtaggctcatggtagagaggaagcatcctaaattaaagccaggaaaaactccgttttcagggccgcaaggcgcacttgctctttgacgaaatcttttgcactaatattgaatatctcggccattgctaagaagtgcacaaagtgagtaatcgatagtattgctggatatgcctcagtgaatgctgctgaagagaaaatggcggggcaaaggaacatgaaaaatggtggtccacatgatacatctactaaaaaagggtcacctgaccgaacaagaaagataagcggcaacctgactgacttaatcatccgattttgctcaaagcctactgttaaaggtgatttgtgattgcgagaaatccagcccattgaatacaagcccccgcatgtttatctaccaatgtcgaagcgtcacctgaaccgagaaaattaaacgcgtcagtccgtggacagctcaaccgtcaaaaaaagctaccgatagaaattagtggagctgggaatggctcaattctggaaagtctttgacctgtggtctcgggaacgtttcttccttgcatcgccagattgaacttcaacctccgcctaatatgaccatatccatataagtgttggcgatgaacctacccaaatgactacctcattgccaatcatgccaatatctcaatcggagaccaaatggtgatgaaatacatccttcagcagcgggaatgtctgccaagtagatatgaacttgggcttagtacggttcgctacgataggtgcagtcgagccgcccctactttgtagtctgtccgggctcgttagttcatccgggaccctggcctacctgtgatgtgtatgccatctagaacattgttctggcctatttttattaaatgcatcttccataccttcttttcatcaagggcccgctggcgattgagacgccaagcaattgaactgtggtagcaaatcgatcctctggaccggcatatgaccacatctaggctgtcggcaaacatcgttgccgcatagcagagaattgaatggagattgagagcgaatatcgactgatggtagacctcatcccccgtcgcttactcttgttcactgcgcttacatctacgaagagattgatcacctgtaataactcagacggaaaccggcccgttgaatgatcatactttgctaaatcatatagtggaggatgttccctgacgccaaaaaaacccgccctgctataatcagccgctctaatgtccaccaatcgtgacgtgtcgcctcagctgaacagattgaacggctcagtccgtatcaatgtccgatcctgattcttctttggggtagtaattacgttcggtagcaaggcgatgaacatcttctgcgtgtctgcgaagatgcatttcatgtaggagatcctcactacacatatgacatctccgatcctgtaagtgcttttctcgaaagtgtcgcaaagttgatttgtattcgctgtacttgtgtgttcgatgatgaacggacagcagcttattgccgtaacattgaaagcatcgtcgaggttttttggccttccaaatatagtttcccgccttctccagaagcaattgctcctttgacatttcaggagagatcgaggctaattttgttgtttgctctttcattgctgagtgctcttcgtcgtcttcatcgcttggggccggccgtttacttcatccacggagtggcccgccttcaaggtgatgacaatattgcgagatagcagcgacagcagcatttcgtctctgtcgctctgcctccaatgaatgggaagttggccaggtcaacaacttttctagaagatcaatttgctctgacagcatactgtctgttcgcaatacgtttttcgcttcctcgttgtcgatagctgctccagagagctgtcgctcaatgtctaggttcgcctgtttacggtcaaactcctttcgaactttctgtctcaatgccctctctagccggccaaaggtgttgagcttttcgcgtgcgagtctgtcacgtcgcaattgcatctgttcactcggatcatagatgcagagttcagcttgctcatccaatcgccggaccgcttcgacatactctggatgttcacggatcgacgctcgttgctcaggagtcagatgccgaggccgtctggtatcaatccacctgctcatgcgggtgattgcacgcatgagagatttgttggattggcggccgttcatcacattttgcatgtccgtgtcaacatgtcgcggaaggtaatggttgaggaatgtgcgatcagcgtgcttcatgatcagattctgctgagcttcgctgaccgaatcactattgttcaacatctttccacctccatagcgcatgcggtgcgcaaacatcgactgaagccaaccatgaattccggggagattcatggttggcttcgaggaccggggattcaaaagcctgcagccagaaaagtataccaaagatgaaaacgtgggggctgaagataagcgacggatcgtcaataatttcggggaacgcaaaagtgttactaagaagaatcaatcatcaggccctttagcatcaaggaatattagatactcacatagcttcagacccgaagaaccgcttcgtatgctccgacctgacctcggccagaagcacgggagggccaccctgaggatccttttgtatagagaactgaagatgcttcaactgcaaggacagcagagcactcagtcgattcaccgtgaatatgccaagcatgctgaaaagacacatctgaatacgctcgtatccgaaattgaacccccgttcctgtgttcgaagaatggtctcattcaattcggtcaagtcttggacgtagactggttctttgcctcgctcttggtcatctagctcgaacttgtcgatcagtttccgaatcccctagaattcctattaagatacttggcgaactagtagactaatcgagcacgtcggaaccgcgaaaatatgatatgtgcgcccgaataaaacaggtggtagagggctcataggtcctaatcctccagcgactgttctctatctctatattggcaaccattagcttcacctgttgctttacaagataacagtgaatcgaggccaatgcccgatcaacatccgaaatgattgccgcactagaaatatcacttagttctctcttcttttgcccacataaattcaataagaagactttcgtcgacgttcttagttgaattatctctgttgcttgattggcagtttgcagttttgtattcagagatgaacgaaaatagaatcgatcaaataattagtctaccggaataatctgttcaacttctgactgttctgctggatagcagcttggggagacccgagtggttccctgcgaccgaaaatagcgacagcccgacatctctcccttccccaatatctcctggttggagcttacacccactgcacaaccaaccatggaggaaacctttcggtccttaacagcggagaaaatccaggagctgctagtaatctgcggaatcagtaactgcagcgatgagcctatcaggcaacacatacttggcatttctaacttcagtgagcccccagactgctgttcgagcaactttccactgacacgcatagtccgccaaacaagacagcaggatggaataacagatccaccacctcttcctacccccgcagctagtccggatcctgaagcaaagcgcggctcttatcggttcctccccacacctgaaaaacgaagtagagcggactacacggggctagacgcaccgtctcatagaaaggaaaggaagaacaaagtcaaggcgaaagataagactactctcaaagcaatggcgcaagggatgaatgatgccgcactacctctaggaggcatgccaaccgattcttcgtcaaccgataaagcgaacacagcgatgaacttacccccggctggggcacccttgaccgactcacacaaccatcaaggcggaaaagcgccgcaaagtatcgtcgagaacatacttgtcaactgtatcaaacttaacgatccacttggaagatacggacaccgttcaaagcaggcaattatgacaacgaaggttgaggcgattcagagttttgtggatgacattgtcaagttgcaataccccgatgcagtccagctaatcaagcaggagaatgcattctcagcaagcaatagtatccaatctcgatttaacgagaccgtgtattgggaaatcatcaaaaaaggcgccgaactccttgatccaaaggatttaccaacatccaaaggccctcttgatgaattcacgatggccgagaaggtcgccaccgagcgcttcatgaaggaagcgggttatggacttagccttgctaatcaacggcagtgccgtcttttttggaaacgactgttcgagatgcggaacgcgggtgttgacaaaattctcttgtatcgcacaaaggaatttgaccgcttctgcaaaagctactcatcagaatctggggcttctttggtagagatggtccggaactgggaagaaaggtatgccttccatatcaaacagttggaagagcgtgtggctgaggagagcaagggcgatttcacaggaagactatggctgagccagccgcttgtagcggacagacttagtgttcctgaaaatgcgtggaacagcgctatcaacccatggtcctccagcgtagaggaaaccgtcttccgattgagcggatcacacgagccatcagctgttgcgcttggtgggttctttgacttgcagccaaaggcagaaacaatgcagaacaagtctattttcgttactcttcaacccaaaggtgatgtctttctcgcggtttgccccctcatttcagtccaggaaggagatacccttgggatatttgctggagtgattcggtactcttcggaatgcggcgttgtctacggtatacctggtcccgaagaaaacctttggctggactacttcacggtgactggggtactaaacctcatgaagatatcagctcctggaggtgacttcaatgttcgtcttcagtgggagctcatcgacggacggagtgaagggcatctcatgtggaaggtctcggtcattgctcttcgggcaattcaaccatttgaagaaattgttcgcgctgctcctcaaaaagcacaatatctcctgcaccagtcgccaacttgcgcaaagcgcggttatacgaaaagccgaagttcctgattcttgttttttatttatatccagtgtctagttgagcgtattctaaaacgccattcaccagtgtcatccgtcatgatagagcaaaagtatatgtatttagcggccgtcgtagtcgtactggttggcatggagggtatctaaaatttggactgctaaggacactttgcgtaagctcagatgtaagacttttaaatgtcccaaggctgagttgcactgacgagtcaacagatagcaggggtgagaaggggcatattttgtgagaggggtaaacatgcattgtcccggtcgatgttacacagcccatctggcagtccaaacaggttccgcccgtcaggcaagcaaatctttgtatctatcaagagccatctctcaaacagaccagttatcagatacaagcactttggaaccaccaccactgacaactacaactattattatccttactttcggggaacatgctgtaaaatgagcaggaaaagagaaggagaaggggattgagaatacatgaaccaaggcccatgaaatgatttgaccaggctggtgcatgggccctgccaagttggatcagatgcgaagaacaacggctattatgacgcattgacaacgcatagttgcacttcgacagggtagccatgacttggcagattgaatatttgcttttttttgcgctcgtgagacgattctgaaccatagccaactaggctgagtgcgaattcggctcgattcccgtactgcaccggcctttttgcggttagtgttacctagaacggagacgtgtcatgtgcggggcaagtttgccaaacccactttaacaaaagatctgcttttcgtattttggcagaaaaataaaatggtgaacacaattccatgattcttggcataatttgccaggtccgatctgctccctacatagtcttcaatcttactgaaaggtgtatgacagaaaaatcccggagccgatacactacgctttgactagccgcaaagataatgaggatttactcccttttggacagcatctaatataattttcgctgagaactattttgtactagtcggccgaatggacatgatatcagctgttgttggtcttccgaggcaggagatgacctgcaactgaaggtagttagttacatgcagtcgctttgggcaacaaggtgtagtcttaaatgccgccgacgccaggaaactaaatgaaagccatctagttgtttaagaagggcggctctttcactttgactgcaatcttcccgaggaagaaaatttcatttgaaacgctatggaaactacaccctccgacaatgatatatcgcgggaaaccatgctacgaattcagcaggatttcctttctgcaattatatctgtgacaaggaaaagaaagatgaaggtgattgggaacatcagaaggctcaaaaagtatttggaaaaccaatatcttgatttcaatttccagattgatggggtctcacctttagcgcaagcaacagtgaaatttggagttctcgaaaagcttctgcaggtggaaagagtcgatttgaatttccgcacttgcgacggtcggacgagtctttattccgctatcatgttgccacagaccgattcaatgaatctattgatgagcaagggggccgagcttgagccgaaggataatcacggtcgcactcctctatctctcgctgcagagcttggacgaatagaccatttgaaacttctcgtggaatccaacgtcaatatcaattcaacagatgagagaggttggtccccattattttgggcgatatcaagcaagcaaaatcacgttgtggaatatttgctatcaaggagaggcattgctgtcggtgagaaagatgtggacggccgaacaccatttgttatcgctgcacaggcggagaatgctgaaagcttaaggcttctcaccaatgtcgcagccacgaccaaggaatacttcaatattgaaggtagtcctttggcatgggccattctccagaaagatatcaccactgttcgaatttgtctacaagcagattgcagacttggaattcgtcaaatttcaggcagaaccccattatcgatagcaacagaggttggaagtagcgacattgcgaggcttctcattgaaacaggagcagatccaaatgcggctgatgagactacatggccaatcctgaaacacttatcatttgaaggctatatgccttctgatagttttctgcgatacgttgactgttccatttccaacgccagcccaaattccacgggagaaaagccattactcctcgctacagaaactgagaatatcggagtcataaaactgttgcttgagacaggcgcagatgtgaacacgtgtgacacggcggggctgacagctctcacctgggcagtcaagcgaaaacttgagcctgcggttcggcttttgcttgcatacccagagactgaggttgattgccgagataaacatggccgaacgccattttcaatggccgctcaattgggcgatgtacatatcttgaaagagattgctcaaaggagccccgacatgaatacagaggatgaaaaccagcggacgccactcatattggctacaaagaacaagcatgaaagcgctgctgagtttttgctcaatttaccagaaactagaattgatcatcaggatgatcaaggtcgaacagccttttccttcgcagcggagaatgagctggtggagactatgcaaatgcttcttgagaaacaagcagatccacacattgttgattcgcacggctgcacaagcttctggcggtttcttaatgcaaggaagcaatggcttgactctctagaaaatgcgaagtttgccgaggtcaatccatttcgcctccaagccttggttcgctccctaccgacgcccaacaagcaagacccgtccggccgtaattggttttcatgggctgcttcatatggggatgaagaaattgtggagtatttcttgctggatgatggaaaggtggacgtcaatattcgggacaacacccaagaaaccttttctaaaacgccgctaatctgggcgctcgaaaatgaaggcaaagccatgacagagctgcttaaatcgagggaccatctttcaatgcatacaataatcgaagaattgcattcaccgaggaaaggccattcggagaacggagaccgaaaaaagaaattgttcaccctgatcaaagcactcgcaaatacgggctacaatctcgatcagcccgattcgaatgggagaacaccattgcatcttgcttgtctttatgaggatgaagaagtggtgcttactcttgttagtaaggcagatcaaaacagcaaggaccataacgcaaagattcctctacaatatgctttggcggcgagaaacatgaaaattgtaaatttgctgctggacgcgcgaggagccgaaatcagttctattagctcacaggaatggttcaatctgagagctgaaaggccttcttgggttcagatcacaaaaaggatgcaaagagaaggctttgatttggaactcgtcgataatcctcaatgcgattggttacctcgagccagagagtctagactttggtgagccattatatttgaacaaagtattgggtctactgacaagtgcagcctttgcaggacagattcaacatggtcacgattccttttacactttgggattcatgatattatgatggaccacaacacttatcttaaacattcccatagtgaatttggccaccgatcttttacgtatatatgggtgaatttccccattgaagaggaggatgagagtgccagggtccggtgcccgtggggcattgcttggatcagcaataagacaacagaaggccttgctgatggatttatcagcacattaccaagcgcatgcataccgcaaaatcctgctgactttgtggggcagttcctcacatgtctgtaccatgaatggaagaacttatgcaccgatgcaagcaaaagagttgaggatttggtgagtggatagaccgttatatgctatttttccaacgaccaatagactcacccatatgaaccacagcgaggcgaccaggtcaggaaaaaaggacggagcttcaatctcgttaatcggcttgccaagaattcacagtctcgtgcacgccttcggcaatgtttgcaatcgcacgttgagcaactcagagatatggtcaatatcgatccctcgtttaacttggaacaaaaatcgagaattttagccgccatcgacgacctcgcacaggttgtaaccacgaagcttgaccatttagagcaggctatcagagagcttttacagatcgtatgcttgcagcccagaatcctaatacagaaaattaaactaagtaaacaggaacttgcttgggtttcaacaaacgagtcagcgagcttcaagcgcctcagttggattaccgtgagtgcagcatacttattttggggaccatgtcagttaacaaacactgctttaccagtttgtttttctacccctgatgtttgtatcggtaagtcgtgctactcaactaggatttgccgtgcttggaattttggctaatgtcatggccagagtctttttgggatgaatgtggacttgctacaaaacaaccctgactggaaatggtacttattattcggggggttgtccctcatcttgaccgggactttgtggatggcttctaaattctttccagtcagtaatgccactgttctaaattgctagcgcagaatgctaattatcatggcgtagatacctcttcaaaagcaaacatctcgggcgccaagaaaacactcacacaagaacggggcgtcgtcgaaagtcacttcgagcatgtgctagaaaattgaagttcaagatcaagacctggagaagtgctttacgggtgatgcttcaccaaactggccaattcagtctggagaagcaatgatacaaaatatacgttctggagacaaaagcgcccaacttcatttccgccgactcctcgcaaaatctgtattggtaacatactagttatttatttgctacaaaaagggcatggcagcggcttgaacttaagttcgcgacaaagactattagagtgagccacgttggatataggtccttactgttctcatgatgatacgtttgcagattatttatatttgaacaagaaactctgagcagagtacagagaaacgctaaccgctttcagctcatcatgtcccacatcagtccctctcattcacagtcgataacaaagctagaccgtcatggcttttcgccatgaaatcactcaaagaaagatttcggaaacctctattgctctatgtcctcaaacgaaccggcaagcgactaaaacaatcattcatggacttgaaaatgagcggcgccacaaggcgattcgggaaattagttaagccgaagtctggctggcgtgatgtgattggcttctctcgcaccatcgttcagaatgccactagtctaaatcaggttactagagcaacgaatatgtttttgggggcctatgatgaacttgcatatcgctttgcgaggagtcaatgtaaatgaatactactactactactactaatactactactactatgataaacttgatggttgatgcagcaacagccattaaacaaatgccatacaatcagattgaaacaagcataagcaagttatataagcaaataatccctgatctctgttcgttacttgcttcacaatcaccaatgatagtaaggtaaaactccgcggacgagcacaaggatcactttctcagccgaatcatgaaggccatggctatctttcgtctaaaaaagaggcaccatttggtcgctaattgttatgagcgatggacttccgcctggagcgggttgatgacctccgggggacgactaagctagttgacatttgactagcttcatactctgctgctatgcacagcttctgcgaacttctcaactgggtcatccgagttaacgggtcacgattgccatcttttaccagcaagatgcatgggaatacggtcagaatgttcttatctcgagcaacctggttttggcaatttgggactgcgttatctcccgggaagggaaaaggctcccaatcgtcatcttcaagatcgactagatcaaactctgtctcgtatcgctgctgagcgcgttggactggaagccaaaagtcagccgcttttagcgcaatcctctctatactcgcgcggatcgaatcatgctgagtttccgagagcaatttccacagatatgaagacatattgcggaccaccgtctgaactcttgcttggagaagactctcttcggcattgagactgagcgagagaagaatacgtcggtaaaaactttccttctcggtatcgttctcggcgaggtgactgaggattccgtaaatttcagaatcttcaggtaaaatgtaattaggctggaagatatttttgcaaatttccctcgaaagaatagccagggttatggtaggcgcatccctttagcttcgggagagtttgagggtgccacggggacatattgctgagaaattctagcattctcttttcgaagcttctcccagatagatatgtcctttaggacaaacaaatgagcggacaagtcgtgaaaggggctagatatacacataccttcaagattttttctacaagatcctccttcaagacggtagttatctcgcttagagcaaagatccaaagatctgaaaagttcgtcgaactgggtgaaatatattagcgtacgaatgtctccaaatgcccacacgtaacttacatcgtgctttcatcaagctccaattgaggaacagtgaagctttcgaggtttcggagttgtccttggctcgtttgtaattctttgttcagtgtagctttctcggcttttaactcttccattttatgctgcgttgataaaagcattgttttgagacttgatccagcagtcttcattttgtcaatgatcttgtacatactagtactgtaaatcttcactctacactccaactatcccagctcacagtagaatcggacttgctccaacgaggcgaccatattccgggctacacgtagctgcacatgggtgcaagaaatatgcgcgcaatcactcgcgtacattgagcctatagggtcaagaacacgttgcattctagccctactttcgcatgcataaactagcatcacttctattgcgcttacaataatggggctcatgaacctcccctcgtacatttgtagagcacccgttcacgtgtagttctcgatcgcaatctctagatggaatccaaacatctataaaatggctgtgtggtatctcttcgcggctctttagaaacttataaatacatcagactctcttgtcggaccaaaattcgttttatgtattggcaaacctgtgaatattcatagcccaacaaagtcttttcatcatgtcttcttctagcgttcaaagccattcaagcgcaagccagtatgtcgcaccttcgacctttaacagcgatagccttcagagctttcttaagaaagtcagtgcactggcgtcaagccctgagtcccaagctgcgtcggctatgattgaagaattcggtcatcagcgtgaacaagtccatgctagaaatgaggagctaaagaaagcccaaaatgagatcctcgatctgaaggagagaaagcgagtcgccattgaggagatgtttgcggccaacgagagcgaaaaggcgaagcaaaaagaagctcttgatcaagtcgactgcgaaaccgctgagacgcctcggcgaagtccaatacggcctggaccgtcttcgcccttgaaacggtgtctggtttacctttctcaccttcgttggagcctcccagcagactcgacacgctgttcagcgcgtctccaaccttccctctcaattccgccctcagccctcggagtttcgggcactccattaatacgtggctgactgtctcctgcgccccgcactcgcaccggtcgtcatcgctgtatccaatcttcttccgatagctggatagccagttgtggcccgtgcgtagctgcgtcagcagatatgcgcgattcctcggtaaattcccgtagagcttccgcgtgtactgcgccggtagatcgccgtcaatttttcgcaggtgggcacctttggtacttgtcttccactcttgcccccattggtcgtaaattttgctacggacgaatgcgttctccctcgatagaagcggtcggaaggggtgagttttacccggctccgcggcttccttcgcgcgacgatctgcagcgtcgttccctgcgttttcacaatgccccggcatccactggaggcgaagtgtgatattctttgcttgaacctcggtggctgtttgcagaattgcatggacaattcgttgccccgatctattttttgcgttctggattgcttgcaaagctgatctgctatcacacaagattgttgccgttatgtgcgctccatttacgacgttggtacgttgatggaccagcttatacaccatattgaccgcatagaagatgccaatgagctctgcaacgtggaccgaccaacgttccatcggccccacctggatctgttgagattccaccacctcatcattgtcgtcgagtgcgacaacagcagcccccaggtggccctcgcggccggaggcgtccgagtagacaacaatgtctgacgtgtcctttgcggactctgccctgtctctcgctctttcccggtcgggttcaagctcaatctccacgaaggcgtcctttcgccacggcggcaacggtcgtgggtcgatcgtctctagttcgttgagcctgtcgacgtccatggtcttcaacgcttccgctagggggaagcgcgcgtacgatcctatgttgtttctacgattctgggcgcgtggtaatgcgctccaaatggggtggtcacgcggtagagtatgtagtctcgcgatggtgcgctgcgcgcggtgacgaaggcgaagatgcgtaggaagtatatgagcttccacctctaacgttgcggtggctactgtccggaaggccgatagaatgcggatcaacgcggttctctgtactgtgttgaggtgtcgcaggtgggtcttgtcccggagcgggtcatgccagactgtcgatgcgtagtctatgataggtgtgacgcatgcctggtagagctgtctcatttgttctgggcgcaagtgtcgtagtccacttaaggcgatagtggccttggtggcgcgtttgatggcctgctgaacatgttccttccagcgaagcccctgatcgaacgtcacccctagcaatttcgctgtgggtgacggtttgacgacagctccattgaaggtcaccccttccgggtgttctcctctctttcgggtgaggtggatgagctcggttttctccgccgcgaagcaggaccccgttcgttgcgcccactcttcgatacgcggaatatcctcagcctgtattttggctacattttcctcggctgaccggcccactcgccatcggaagtagtcgtcaatgaatgccgacgcgcctccgtgggagtcgacgggctggtcgaccagatcggcgttaaagaaagcaaacaggatgggagacagtggcgagccttgcgctagacctgcattcactagcagctctgtctcggtacggaaatcgtcgaatccaatgttggcgtgccggtcactcatgaagctcgcgatccattttcttgccaccactgggatccctctcgcctgtaaagaggcatctaggctcaccctgtttaccccgttgaaggcgcccttgaggtcgaatgcgattaaagttaccaccttgtgcttgtaccatgcttggtcgatcgcattcgacagcaccagcaatgcttgctcggtggttctgcccgggcgtcccccgaactggctgctcggtagcaagccatgcttctctgcaagataagataaccgtcgggccatcacggcctcgaggagcttcccgagcgtgttcaaaagtgagattgggcggtaagcaccgggcatcgcgtaatctggcttgcccggtttccgtaagacaataattttcgcgctccgccatggttttgggtggtgtcctaggtctatacacgctctgaagatgctagtgatgaagggcttcaaatatacccatagctttttccagacccgcatcggcagattgtcctcccctggcgcagtggttcctttcgctgttttcagggatcgctctatctcgagtgtggtgatcgggtgccacggaagttctggttgtggcgacgctggtaggctgggatcggatgtgttcattgcgggaaagaacgcttcaagaaaggcccttgctttgtctttgttctgggtgagctcttgtgagcccaccttcagagccggggtgcacccccacgtttctcgaggcttcatgtaggtcgcagctttccagagcttcccatcgcccgcctcatctaagaactgtttccaatgtgacgctttagccttttcgattgttcgagtccatgctcggcgcttagattgcatggtctgaaaggcagcagtggtgctagcgtggtctcgtccaagctctgcacagctcgcctgccatcttctgcgcagttgattgacttcgacttgttgcaccttgagatatggtgtgaaccaccgcttggagtatggggctgggcgagtgtcgggcgtgaactggtcgactgcctgggctgtcgctgatgtgagcttctccaccacccggtcgagtgttggccgggtcttgatatccttccaggggctcatcttccgagccacctcctcgccgattctggcccagtccgcgcgctcatacgcctttcttactttgtcgtttggcttgctctggggttgaagatcccattccgagtacgtggcacggtggtcggacccatagttctcgtgatacagatggcacttgacaagccgttccggtttgtctgtcactgttagatcgatggtcgagttttggcctggattgttcaaggcccagtaagtcgctgtccctcgggggaggcagctgtggaggttgtggctttggagaaactcgatcaggtccccggcctgctcgatgaatctgggtgggatgtggttgccgccccacagtgggtgatgtcggttgaagtctccggatagaatgatgttcgtcggccgctgctcattgtgcagcgtggtcgtgatggtgttttgtattgctgtaagggctggtagtgctgactcatcgtcgcccatgaaaagcggtgctggaggtatgtagaccgacaggagaaggatttgggagtcggctgaccagatcttgatggctgcgacatctgggtggtcgcaaggtatctggcggtgtgaggaggtggaaagtcgtctattgacgtagatcaggctgcggaatcgaactgcgtcggtttgcgtagtaggtcgataaagtcgccaagcgctgtggttgacatgcgtgcggtatgtggtaatggatggctcctggatcaaaagtgcatccagatcttggctctgagggtcattgatcagtgcctccattctcggtcctgatttcattatgttcaactgtaggactcgaaggttcctttctagcatcttgtggggttgaaggtcgccggagctgggcactgtcgatagcccgtagggtgttcaccactacagtcgaggcatctggccctcactccgggtgggcagcgctcccgttcgtgttggcccgcacagtgtccgcatcgtggcatttctttgcacgtccatgccagatggccaaaccgttggcatcggaagcatctctttctcttgatttcccgtcgctccacctggtgaataaagttcccactaacaaggaacccctcccgaagcatatggtccgctccttctgcggagtcgaaccaaatgcccagagaagcaaatttccctagggtcttgtcttttgctttcatccaggccagctcttcgatgcgaaagccgtgttccgctagatcgttgtcttcgataattttttctaccgcctgagtggccccggtttccaggtcaaattcctcggtgggggttcggtgtacgacgaccccaaaccgtggttttaccagctttgtgttgttgcccaattgatgtagccactcggtgttgctgcgggccgcctcagtcgactccgtgttcttgaatcgaatgatatagccagttttggtagtgccgaccccggccacttggacgtcttgcgttgcggcttcgctctgcaatgcggtgcgaatgtggttgttggcggcatcgatggggaggtatcgcccgaaggcgtttccatcattgtcattactgtctcttgggtccacaaaggtcctttgagtgctgattcgaatgcaattttgctctttctcgggtttagggtggttcagcggggaggtgtcattgccgccgctagctgcgactgtggcccaggtcctggtcgccgtcgctggtggggtgttttccacttgtgctcgcaacgctttcacctcctcgtgaagcttttcgttctgttcctgaagaacattctggttgtgtttgatctcctgcagttcatcttgggtagctacgatggccgcggtttggcggcggatgatgtctttcagcgtgccgatgagtttccacacctccttggtggtgattcgagcagcggggtccgcaggtgcgaagacatcgccactccgggttcgcttccggctctcagagagcaagccggggctgtcagcagccgccgtagcctgcagttcttcccctggtatgctggtgatcgtttcttgggtgtttgtgggaaagggctcgggccctcccgtcggtgggtccgacatcgctttggggatggttcccgctcggtacacgacgttaaagttaaaccgctggttggatacagggccccttctatgccttgaagtacagtgcgccaactagatacagcaatattcgcttcagtacaggatcgctcggtacaggatcgagtggttcccgcaaagatcaggagtgtacagggtagtagtagtagtagtagtagtagtagtagtagtagtagtagtaggattcatttaccctgtcccctcgcgaacgatatgcaggatacaacaactatatatcatgaatgaagtacatgtagagtggtccactttctgactgaatcttagagcctcgtcacggcctaccctggcccattgccgctcccgctgttaggctgcccctgtggcgtacgactgcgaaaccgctgtgnnnnnnnnnnnnnnnnnnnnnnnnnnnnnnnnnnnnnnnnnnnnnnnnnnnnnnnnnnnnnnnnnnnnnnnnnnnnnnnnnnnnnnnnnnnnnnnnnnnnnnnnnnnnnnnnnnnnnnnnnnnnnnnnnnnnnnnnnnnnnnnnnnnnnnnnnnnnnnnnnnnnnnnnnnnnnnnnnnnnnnnnnnnnnnnnnnnnnnnnnnnnnnnnnnnnnnnnnnnnnnnnnnnnnnnnnnncgagtatgtacatgtagagtggtccactttctgactgaatcttagagcctcgtcacggcctgccctggcctattgccgctcccgctgttaggctgcccttgtggcgcacgactgcgaaacctctgtgacgcctcggcgaagtccaatacggcctcaaccgtcttcgccctcgagacggtgtctggattacctctctcaccttcagttgagcctcccagcagactcgacacgctgttcaacgcgtccccaaccctactccttaaaatcatccgcaaagctcgtagttttagacattccagcaacacatggctgaccgtctcctgcgcgccgtactcgcatcgatcatcgtcccggaagccaaatttcttggcgtacgtggataaccagttgtggcccgtgcgcagctaagtgagcaggtatactcggttcctgggcaagcttccgtacattttcctggtgtacctcgctggtagcgcgctgtccaccttccgtagatacgctcctttggtgcttgagttctactcctgctcctactgagcgtgaatcttgccgcggagaaaggcgttctctctcgttagcagcggccggaaaggatgggttttgcctggttgcgccgcttctttggcgagtcgatccgcggcctcgttcccggcgatttcacagtgtcctggcatctactgaagacggagggaaatatgccctgcttgaacctcggtggctgcttggaggattgcatggatgattcgttgccctgatctatttcttacgttctggattgcttgcaatgcggatctgctgtcgcagaggattgttgctgttgcttgcctttggtttctaaagattgcgcgttggtgagccagtttgaatatcatgctaaccgcgtagaagatccctattagttccgctatatgaaccgactaccgttctatcgaccccacttgcacctgttgcgaatctgttacctgatcattgtcgttgagggtgacgatggcggctcctagatgaccctcgcgcccggaggcgtccgagtagacgactatgtctgatgtgtcctttgcggacgccgccctttctctcgctgtgtctcggtcgggttccagctcaatctctgcgaaggcttcctttcgccacggtggtagcgggtgtgggtcaatgatttctagcttattgagcctgtcgatgtccatggttttcagcgcttctgctaacgggaagcgagcatacgatccgatattgtttctacggttctgggctctgaataacgcactccaaatgggatgatcgcggggtagagtgtgcagtctcgcgatcgtccgctacgcgcggtggcgaaggcgaaggtgtgtgggaagtatataggcttctacctctagggtcgcggttgctaccgtcctgaacgccgacaggattctgatcagcacgtttctctgaactgtgttcaagtgtcggatgtgaactttgtctctaagcgggtcatgctagaccgtcgatgcgtagtctactataggtgcgatacatgcctggtagagctgtcgtatctgctcagggcgcaagtgtcgtagtctacttaaggcgattgccgttttggtggcgcgcttgataacctgctggacatgctccttccagcgaagtcgttggtcgaataccacccctagtaatttggctgtaggcgatggcttgacgtcggtcccatcgaagatgatttgtccttctctgtgttctcccttctttcgggtgaggtggataagctcggtcttctccgctgcgaagcaggatccagttcgccgcgcccactcttcgatacgagggacatcttcagactgtatcttggacaaattttctggtactgaaccccccactctccatcggaagtagtcgtcaatgaatgccgacgcacctccctgggagtcgacgggctggtcgactaggtcggcgttgaagaatgcaaacaaaatgggggaaagtggtgatccttgagctagcccagcgttcaccagcggagcagtctcagtgcggaagtcgtcaaatccaatgttggcgtgccggtcgcttatgaagcttgcgatccattttctggccaccagcgggatccgtcttgcctgcagcgacgcatccaggcttgtcttatttactccgttgaaggcgcctttaaggtcgaaggcaattagggtcaccaccttgtgcttgtaccaggctttgtcaatcgcactggacagcactagcagggcttgctcggtggtcctacccggtcgtccgccgaactggctgtttggtagcaggccgtgtttctccgccagaaaggataaccgtcgggccatcactgcctccaggagtttgccaagtgtgttcaaaagtgagattgggcgataagcaccaggggccgagtaatccggcttgcctggtttccgtaagacgatgatcttcgcgctcctccactgtctcgggtggtgtcctagctctatacacactgcgaagatgctcacaataatggcctttagatgcttccaaagcttcttccagaccagcatcggtaagtgatcttccccgggtgcagtattccctttagctgctttcagtgatcgctcgatctccacttcagtaatcggatgccactgaagttccgtctccgttgcgctgggtgggctgatttcgggtgtattcatggtggggaagaacgcatccatgaatgccctcgctttgtctttattttgagtgcaatcctccgagcccactcgcagtgctgggatataaccctatgtctctcggggcttcatgtatgtcgcggccttccagagcttccctttaccagcttcgtctaggaactgcttccagtgcgaggacttggctttctcgatggtcctcgtccacgctcgtcgtttctgctgcatagcttcgaaggcagccgtggtgttagcgtgctctcttcccagctcggcgcagtttgcctgccacctcctacgcagttggttgacttcgacttgttgggtcttaagatctggcgtgaaccatcgcttggagtatggcgtcgggcgtgtgtcgggtgtgaaccggtcgaccgcctgggccgtcaccgctgtaaggttttccactacccggtcgagtgttggccgggtcttgatctgcttccatgggttcatctgtcggactacttcctcgccgatcctagtccagtccgcgcgctcatacgccttccttgctttggtgtttggcctgctccggagttgaaggttccattctggataggtggcacggtggtcggatccatagttttcgtgatacagatagcatttgatgagcaagtccgggttatctgtcaccgtctggtcaatggtcgagttctgtctagagttgttgaatgcccagtaagtcgccgtccctcgagggagacaactgtggaggttgtgggcttggaagaaatcgatcaggtcgctggcgtcttcaatgaatctaggagcgatatagttgttgccccacattggatcggctattgcagtgagcaccggcattgctgacgcgtcatcgaccgtaaagagcggtactggaggtatgtagacagaaaagaaaagagtttgagaagcggccgtccagatcttgatggctacgacatctgggtggttgcagggaatttgaaggtgtgaggaggtggagatccgtctgtttacgtagatgagactgcggaaccgaactgcatcgtcaatggaattcgaaatcagttttaactttaaactcttacaatttaattccctgaccctaagtggagacacgctaatctaattttagctcttccccggttgatccatgtagggctgtatgtattcactggtaaccacaatgggtcattgttatagtaatcgtgactaagcattcacctaggtgagccaaggcctaaacacaaaccaaggcctagacacaaaaacttcatgctttcaatttcagacctatttttcagctatcatactatctatatttacatatttaaagaactcatcatctacatcgagataatctctacctcctgatgcctcttctttttctttaagagcttggttggcccgaagccagtagtctcgaatccttgcatgcgcactctcgttgccaatgtccaattttgtttccttcgtacagcgtcgatgaaccctcgaattgcctgcaattgacgataatggggacttagaagcaccctttataacacgctttgattttttgacaggaattttgtggctttgcatctttttgatcgtctgctttgcaagggctaggtcttggatagcctgcttgccgccacgaattgcacggtttatatgcttttgaaccttcggaaggtctggctcgtcgttttcgaatatcgtttgaagcttattctcaatttttgagaacctttgatccgagttcggcggcgaattggtgactgagctaggaatttccgcctctggcgaaggtgtatgaccatagatctcaagcactggttcatcttcccagccaggatcaatttaatcacagacaatatttggattccaaggccaaataccagtatcatagaatgatgatttaatagttcgtgatttaaatgtgtctttgcgaactgttttgattaaccgaagaaaatgccgtttatcatcaacatctccaccccatcgtacgatctcattattcttctttcggaatttctgtttaaggaccgagaatggcttgccatcgagaggctggcatcgatgtgtcaatttcggtataaaccaccaaggtataatattaagggattggcaaaggtattcgaattccggggttccatgagagccatggttatccataaccaaaaccctaggtctacctttggtaactcgctttttggtggtataatggaaatccaatagccattgaatcgcagttttatcgtccgtccagcctttagcagttggtttaataaccctataattggaagggtcattatcgccgtcgaaccaatcttccatttgttcagaaccacacattaaagatcatagatgtataacccagccatcggctgaaatgcattcaataccagtgatattctggcctattccaccggtcgcaatagtctcattttcacgggtagaagcgacgttttccttagttccaacgcctagctgaaagccagtttcatcccagttatatagttcgtgggcctgaattttgttctttttaaggaattggccaaagaccttataccaatgaactaattcaccgtgtaattcggcctcgattctcgctttttccataggcttttgtgtacggagagtgatatacggtggtaggcgcgcgataaattggtagccatacattttactaacctgccggtcggaaccgcagtgctgtaaaatgcgatttgcagcgccctcaatatctaaagcagtcggtggtgtatatactgaattaagcagctcaatgcagcgaatcagggatctctcttgcgactgatttagtgctttgttggtggctgtacggccttttttactaggcgtgccgttacttcgattccgaagcttccactttgagatgccaaaatgagaggctgcggcctgaatactcttgaattggcctaatttataggcatcgacggcatctgagagaagaatctcttctttttcggacgaaattggcatagttttggtggtaaaaagtaaggacaaaaattgaaggttgaagtttttgtgtttaggcattggtttgtgtttaggccttggctcacctacacgcgggacgggtgtaggtgaatgcttagtcacgattaccgtaatttctttagaaaccgatggaatccatcgtgcaaacatatcaaacaaaaagagaatctggcaaaatcttctttcattctctcatgtcttggtctatttgtcacgcgcagccttctctttcgcatctaaaagaaggctgtaatgacgccagagagaaatcatcctggtacgcaacttgtttctctacagctttggcctctgttatccactgcgattctcattcgttaccaagtcctaaggaaatccgtcacttggggaagttgacatggaccctcccaggactgccatcgtactgtagagatgacacagagcccatattaatcttgttcaaaagtcgcgatttaattgttttaagacgtctatctccctgtgccgttcatcatagaatgaaaagtactccggtactgcgcgacgtggcgaagagtaattcgtgtcaatgttgtcggcagtatgagaaccatgtattggtcagattcccgcgctcgtgttagatggtgattggcagctattaacgtggctgggtctcgaccgtttcgaccaagcctaggagaacagcacgcacatttgagatgtgttcgatggggatagggtggagatgatcctgcactcttacatctggtcatcaagtcagcagtataagactttcggccattgaagatttatctccgtgctttctcagtaggatattcaaagagatacttcacaagctgcatttttacaatgtctggtaagtatgtcatctggccgcagccgatgtatttgggcgtattattaacttccatagcttccgaaacgtcacctgataggcgtccagacccagaatctttaggcaggtgcaccgttgcagagattttaggaagtccatctctcgaggcctccctcaaaagactcgatcttaagaccggccggggtcccgaatttgtggataccgaagctaaggttgcgagtctggttgggaaactgcaagacttacctaccaacccgccgtctctttatattgatcttgaaggggtcaatctctcaagacacggtagcatttcggtccttcaaatctacgttcttccgcttgacgaaacctatctggtcgatatatacactctcaaggagaaggctttcttgcagccggcttctaacaatgaccagaccctactaggtatattggaatcaccatgtatctctaaggtcttcttcgatgtccgaaacgactcagatgcactatttaatcatttcaatgtcaaacttgccggggttattgatcttcaattgatggaattggcaacccggtattactcgaagaaatacgtcagcggactggcaaaatgcatcgatagggatgctcctctcacgactgatgaaatgcgaacttggaaggcatcaaaggaaaaagggctgaagctcttcgctccagagcgtgggggcagctatgatgtgttcaacgtccgccctcttccagatgatatcaaggaatattgtgtgcaagacgttcaattcctacctaagctatgggtccagtaccaggggaagatatcgtcgtcttggaccaaaagggttatgacggagagcgctaatagagtaatgctctctcaaacagccacatacgacggaaagggaaaagataaagctctagcgcctgtaggctggtggtgattctgcgattgctgctatggtctttcctactatttggtcggacaagtttggctacatccattctagttttagcggagtctgcttgattgaaaggtacaaattgcacacgaatacgtttttcgtcaaagcgaaaagggcagcaggagatggcgcgcccaaagaaacgctgagcaactatacatagaaccgggctctcaagtctgcgggataagagattcatgcaccttggctggtccgttctctgccgagtagcatttattggttgccggggaaacagggcaacgaggagtgcgtagtgacgtcaagtactggaaatcggctgagttgtaagagcagggtgaaaaaattatcgctggtagacttggggggtggcagggtataaggaaatgcacggacatcagagcaagtggagacaaataatactcgaacaaagaaaacattcaccaagaacttatttcacgtttgacatgcgcataaaggacaaggaccgtaaacactaacactgccgtcaacagctcttgacttcctatttactcaacgtttatcgagttcgtcgtgtgcaatggtcaacacacgtccaggatcaaccaatccacccgagttccacgatgacatttcttgaagggcatccgtttcctccctctactatggcgagagctcaaacacgttgaattggcctctcaaggccatcgaaaatgagcggcctctcaattcttcaatgccgctgcacttaactgcgtttgcccgccttgttccggtttaacccagctagctgtttttctgattaaactacgatatgctgagttagggagctagattcaatcattgctcctaggatcatgctcacggcctctgggagctaaatgtcctccaggaactgtacctgtcactcctgggagcgagacagatcgttcctgggctctccaccttggatcctggagccactcccgtccgttcacagggagcgttgattacttctgggagcaattgttccgctgcccgaaattattgcccgctttttagatcccgcttattatctcacaagtgagactcacattcctatatcatatctggccgcaagatccatagtatggttcctaggtacgctcatggtcgctcctagggattagattcatacttcctaggggatctacagctcccgggagtggataatagcttcggggaactagagtgggttccctgggctttaacgtttagcacgatcggtgccgtgggattagtggggtcacccacacttttccatctggtcctggccccctgagtacgattcccgggatcacgagagctccccggaattaacaaatgattcccagaggtagggcattaggaatctaggaatacaaatctagatactaggagcaactagggctaggaataattcgtgtctttccaggaacttgcatagagaaggtgacttgcgtagggacacactggagagtagggacacactggagagtagggacacactggagagtagggacacaccggagagtaaggacacactggaaaaatccgggtggggcaatgagcgcgacactaaaatttgtgtcgcgcctgctgaagagcacaggcgacacagaaagcgacacgtcatatgaactggctcttcgtaccacttctcttctagtccaataatcctatgcctagataagtattgagataatccaaaggcgatcaagctcttctggcagggcattccatttttggactagtgttactctgaactccggaaacagagacgctaagtgtttcacgttacatagttcgtcgacgaatgataagattgttgacaaacagacagcaatcaaaacagactagctatagtatatagaaattataggggagactaaactcacaggatttcaatctcgtgaagagcgtagtcagaaggttttgagccactacagtcactgggctgtcgcggccgtcagtcaatggacctggagcccagctagacctaaagctgtggacgtacgtccagcttggactcaaatccacagcccgaagtacttggccccagatcggctgctctgggcccttgtctatggaaccacagccctcccactatagctcctcggcattggacgtgcgtcactggaccactggcttgcccagatagtggccccaaaaccgcagtcattgttcctaaggctatggcctatagtcctaggtggctcacgagccacggaccatgggccagctgggctcagtatctatcaaccggcgacttggttggattactaacctggatggcctggtatcgagtactaatatgttatactaaatacctctggccaatagtcggccacctctagccactttgtcccgggttactttaagtttctgcccgaggttcatagatattgtcgcccttcctctctttatcgggtctagctcagacggacctgatctagtatacattcaaaacacacctgacgctccctgatttagaaactttttggtttctttattctcagtctgttgattaccactctcccgaaatccagggccttctcaacggcttcttggtgaatacagtgaaagaactggcgtgtttattgaaactattggccaaacagcagccccacaccacgcccatttcctaatacccaggcaacccccaagtctactacaggaatcatttcagcctgtttcagtgatatacatgaagcatacaggatgtttggagatatgatctgcgggacccacatggtgcatatcggttcccctggacgcgaggaagctatctttcttttgcttccacgcgctacgtcttgtatctagagtcgactacagctttatttaatattgattactgatctgaatacgctgtccccatctacggatacgttcagcattatggaatccgacgcgagtccagtgtgtagtaaggacagccaactactcgaggctagagagcagtgctagaactacgccaccgtaatttatggactatcaaatgctgtaacttcttgattggacgccgttcgggtgctctcttcccctctgttctcgactaagcactaacgttctggcacgccagctcacttatgagttggcagttagtaccctatgccggctacccagggactggccctcccctctcccaagctgcttttgaggtataaatccaaactcttaatcccgttttcttttcttggctgacttaaaaccaaaaccctcgcatatcagttcttcacaacaacttaattcagccatggccccacaagcattttactatgcggtttataaaggtcgtgttgacaggcctgctatatattgttcttggtaaatgagatcaaatccggaaaagtggcgcttttttcgctgatgttctatctgtctaggagccaagtgcatccaagagtgacaggatgcgaaggcgctgatcatgaaaagttgaaaacactcgaggccgcctgcaatggaatgttccaaagaggaatcaaagattttgatatgcccatcaaaaattccgccaaacgagataccatgccagtgaatatgggcaaacattgggctgtagctggtggcagggctactggcattttcaccgattggaaggaagtttcattcctttcgtatgcaaagtcaatatctaattagaataggagtgcagaaaaagccatcaaaggaacaaaagcctgccatgaggcttttagctcccaagaagaagcagaagattttattgcaagttggaaagatgccttcgctgacgtatcgcgactggccatcagacaagcattagagaatagatggaagcctcgtaatatgaagtttaatgttgagtcatttttaattagagacaatgagaatatgatggggaaaaacgacaaagagatcaagttgtgtgggattgaaaaagaggaaaacctttttaaactttgaaaagttggctatcaaagaagaacataggatatgaagcttcgtctactggaccctggatctacaatcaatctattgatacgttctgaattgcacccgaatatacaaaccaatgctctctgaagtttgtaaaagtttgcatcatatcacgattccgcacctatacaagtctcttgtttttaccacccgggagttgtcactgtcaagcctgtgcatgcagatagagtctgtcgaatgggacctgagatacacgcgggaactaggatttcgagctccagttcatcaccggagggcaagccgttgtgttcactttgacgatggaatgggtgaacttcctacaaattccacaacactatgtcggaaaagcgaaagcagacgtctgagtcaaggtgtaaagcctcgctattgttcgctcttgggtggggtcgtggacgagacattgggcgcggaccgctccgtcgtcagcttaaagcctcggccataacgatctttgaattccgataaaggtttatcttccaagccttcatcttgccctgctgaaggcgagcccctatgatcggtgttcgcaaaattcaccctggtcatattctttgacaactgttgaagcggtgcatcactaagatggcccccaacttgccttgtcctccatcccagcccacgatttctgccatgaattattttctcattggtagagaccataaattgaatggcgtcgccagtggcataattatcgatcgtactagcattttcgtccaaatgggtcccagccttcgagcagatatgcatgcattgacgagttgtctcccactcttcttgtaacctgagcagttttgcaatgtcctcctgagaggctgttaaggttgatgtcagtgagcgaatgggtttgaagcagcaaaggctttgttctttaattcagagccacggagcagaatccctgtgatgcatagaactgaattttatgactacatgatgcaatactgtacaccgttgacgagtacagtacgtctcactcttcgattattcctcgaaccttgatgccaatatccactggactatattaagagtaaaactaggacgtaggaaaatcattaatatacaacacctttacctggtagattgagtgtgcaagggtggttccagtcatcgattaagctagtcaatcgatctcgagatgactccagtgcctgctcgaagaagcgcaatcgagacagttgcttgtcgtggcgaagctgaagaccttccctctgtgctctcagctgcataccagtctgcttcaaaagaacgttatcccgctctagcttctcgccatcaatgtgcttggacacgcatgactcccagaggcgttgatagagtccaacgagtcgagctagaaaggctaacttgggatcgtcgcgttcgaggtttgctagcaccttcgaaatggcctgaaagggctcagtcgccaaggtaggtcttctttctgtttcctgctgtgaaggggggaactgcgatagtcagcaagaatacttcaagccgaatcttttcacctaccaatggagggacctggcaagaagtttccggcgagttgtttttatcgtttaagattggcaattcactgggcccctgaacaccttccatttcctggtctcgcgagttattcggggcatccattctgcctaggggagaatgtcaaagatctgggcaatgccacctctacgaattctccatgtgtcttatagactagcagacgcaggtggttctggcctgggtttaccggtcaccacattagtcaaccaacgaagtcagcatgtgaatttttattattatttccagcacgcgattggtaattgggagtcaatttgatagaggcagactgatcaacgagtcgcccggggagatttgatcaagcttcacgatgttgagggtatccgaacgcttattgaggaaatatctaatctatttcaaagatacctccactttcgttgaaagtctcaggaaattgataaacaaaacattgtagaattgacagccatcaaaggaaactatgaccccaatatgtcttgatggtcacaagttcaaagaatcgaaggtatggccaagcttcaacgggttgacgggccgagcaccggcacacccgaccgtgacctcgctttccgcggtcgagacagctcaacaccaacacaacacgaaatcgaggctagggaaaaaaattcatagtttcaagtgacgaaattgtaggcgcttttcggtgagttgacattccgtttctcgataacgtgaacagaataagaaatacgagcctgttaatacggattgaatatcgtccagaaatcattagtacaagactgccgtgaaggattcaacaatcagtcaacgtttcttggccggcttagcatccctttttccgaaaaccactcttactcgtctctctcgctgagcgtctaaaagcatcaaagatgccgctgcaaatacttgcagtaaaagaagacataggctttgattggccttacgctttctaccaataagagcacttacgcaataggatgagccgagaaggctataagtacgtcttctgtccatggaattttgatctatcgtcgattcacttgactctgcaaaatcgagcaggcttatgtctgaggtatctgataattcctcacactttgactcagtataaaagttcgtattgtactaacatttataggatatatcgtgtaccagcaagtcagacggtatctgtgagcgatgatttctagcagataatttgccaaccagccagccgatcaacgagacaagacaaagcaggctggtcaacggtctatgagcagccgactgagctgatctacagtagctcttctgtgtatccccaagataaaagctcaaatattcacgtcccaggtaagtaattttgagcccgacctatcggaaattcttcttatcctacaaacaatgcgatttgaatagaaccgaggacattcaaccacaatgtacgagcgcaagaaccacggttctttgccgtctcttcatccctggacccgagcaccagaatatgtgagtgatgaattatctacaaactaataaattgcagcgagccattggtaccagtatgacccccgaggatacaacacccgtgttattgctctgcactaaccatggtctacacccccgtcctggtcccgtcgctatcaatcgagcaggacacctaggcaaggtttatagaaatcaaaggagcgggccaataacaggatacgaacattttattgcgagtttcgcgttatagaagcttgagacgtctattctgccggtaaggtaagtgatttatcgtgccttttactgggccatatctatttatttgtgcaaacttttatggtgccaaacacgaatccaattactgattttcggtatatataggagcagcctatcatcgtccgtaaacatccttggggtcctattgccctcgatcctactgccttcataccataaacggcggagtggataaacctctttctggccgttagcatcgcgaggtcttctctcatcacaaatgcacagtttcctgttacatgggggcttgccacgcgcctttggcgtctcagaagttgcccggtgcccccagtacaggtttatcgaagcggtaaccggagagtgcgatgcacatgaatccaacacggcataaattgtgactgcattgccggggagggctatatgctctagtcggtaggccgataggatcacaaggctaattgatgtcccattcgtaagcgtacactctacggagcttataaacaggtaagtcgtgacaactcgtccaagtgattcaagccttgctaactcagatcgtataaccgaggcacaggcaaaccaataagagagcccactacccaagaatcacctcggatatctccaagctgtataatgagggatttaaatagtatcatggtgtatcctgctggatagatggttggtagatttgactcttaggtgcgcattttctatcccaaccgaagcaatatgtgcagagaccattgaccctagctgtcactgcagcaggctagttacgttgaccgcgtttatattttgtctattgatatcgtcttctaaacatatcacgcctaagcaactgtggctaggaaagcgctggattctctacgtcccctctctcgagtattcactcatacaaaacagatcatgaagataatttgtaggtcttcgcttcttctagtactgtcaaatactcaaattctctccccgtttcaaacactctctgctccattccttcatatggtactgatttgtagcagtacctcacggcgtcatcttcacagtcccctcgtatcgtccgattgaactttcagatcgctgcaacaaaatgtatcagaatcaagatcactactgcagctccaaaggcggcttggccaacagctccatagtacatgacgacgtagtacggaaacgaaccatctctgtcaagaagttcaaatgaggattggagaccgtgaatgccacctgcaacacagcctcctattgtcacaacaggcaagctcaggagaaatgacatacagccatagtagactcgagccttgcaatcttcctgtatccatcgggggtggaccaaaataagtataccaaaaatggaaagcattgctgagataagggccgtgataaccatggtaatgagagtgtcgctcataagcttctggagtgtgatgtccagcatgaaatagttggcgttggcgaggtcagattttgcgcggttttgcaggacgtccgcgaagtgtgctaacgctgagctgagagtggcaagtcccagccaggtgacagtaaggaaagaaacgatcagtcgtatccggaccacgccattagtgaaaatagaaggcattgttcacagaaacggtatctctgatttcaaaaaagtgatttggggcttgtgctggcaagttcttgaataatgagagaatggaagcaaaaaataaagtggtcaatatctccggacacaggcaatctatttatactttccagtatatacagtgctctgtgcatacgaagcttgtctattcaataaaagacatagtcgatcctcagctgtatcaagcgccctttgcattgtccgctgcctaagtggcaatctgcataggtttctccgagatatacgttctgcgacttacattgctatcccttcttggccggtcgctttgcgaacggttttcagcctctcaaataaaacaaagctcctaggaccgcccgtgaattctgtcagggatatacgtgaagcatgtaggtaaaatagagatatgatctgtatgacgagatagtatacgtaattatagagcagcctacggcaccgggtattgccactctttcttttccttctataccaagtaacctcttctctgaagacgaagtcgtgttatcccacgagactttggtccatcattatggatatttcagccctgccccgacaaatgccaattttttacaattgggccggaagcgactcgactaatatagcgtatataattctcagattcatacaaagtacaagaatatactttttatatgcctctccacgcgtacaaagccaagtaccacagtattcctacttagaatgggttgctcaccaatataggcaacccctagggcgggcaatcacgagccgagtccgaatatctcggatgctatctctatcgctgttatattccaggctacagtattcaagattcatctttcgttttgtcttgccacttgcacatttctagttggcgtcaaatatgaaagcatggttgggagggtggctaccagacgtgaggcctgttgatatctctggattataattctactggcttcaacaaagtgggttattgtaaagaaacgttgatagaccggaggacccaatttcggctcaacgtccacacttccaaacaccaatagatgatatgaggttcggtcaagttggcgtaattaaaaagcagtttcttcgtagacggggtcgccagatagcgcgaaaaggccgggaaaatacgtactgtatggttagagaagacatacagaatatctccttcaacaaccgttcagttcgggaattttttgttgttcaacagttatcaaatggggaggccgataatgaccgcgacaacgtttagttgtcacaacggtcaccacagaatgaaaatcgcacatttttcttcgggcttctctttaatggtcactcggatttcacgtcattggtgagcagagggtgctacgaacaatagacagattgaccaaagaaatgaattggtggtcacaagctcgatgttgaaagtggatgttcaacgaggtctctaacatctgtcgggccattgaattgcgtttgtgccacctttataaagacgttgaagtagccctttggatctggctagcatataagagagactgtcctgtaagaagtatattgttagaaccctgaatctttgcaaacggataggatggatgccccaaatgaactaccgggccaagatagagcagaccgtcagccaagtgaaatgcctatccgaagtgatgaggcctactcaggagctatttccgattccgaaacccaaatggtaagctacgtgcaataatacgttctatactttggctgaccaccgcattccttcgcaatagcaggaagcaggcccgaagaaacccttgacgatcgagtactttcaacctatattggagacactagccgatcttgatcgccacgatccaaaactcgcctttcaagcggctcgagctgtgggactctatcgacgtgtatgggcttcgtgtgagcccagtggccacggtggtgagaaagtagatcagaaaagagggattttgggggaagcccctatcaaattaggcaacgagcaagacggtctccaacttcgtcctaatgagcagctatgttttctggattcctttgaacgggctctggagcaaactcaagaacgactagtcagcgtgctcaaggaatggaatcaagtcttgagaagtgatctggccgtaatgatagataccgacagatacgcctgagaggctgccagcggaggagtgtcatgtcgacttcagagctattgaatatatcactggaaacaggaaccctggaaataaaacagctcgtatttaactataaaataagctaaatgggtgtgttttccccggtatggctgcctctttggccaacacatcggcggtgtcgttccggggcatttcacaatgtccaggtatccactgtagtcgaatcgacgtgccgtgtgtcttgattataccggcttctttccctataccaaagaagtggagcgccaatggtgaattgatcgatgtaacctatatagaagtgccctacgcgttcgcgttcgtgggtctcaaagcgtaacgcgaggttcaataaaatactgcactgggtcaatttgtggttcgaatcatttcaacaccaagggccaagcggtcttcaccgagccccgccgatccgactcgcaatttcggaggccaaagaggtatgaggtagaatgcgatctactcaagatactcacaacatttacatacattcaacaatacggatccatccaattggtaacggtgaaactgcaaaactttctgtccaggtagcggctccaggagccagctggcggatcctgggagcagggcgcctattctgagtaccttgcgtatacgtagatgaagagtgcttcaatactgaagaacgctatactcaactctcagtacagaacgtaggggcttcctcacattcagggaatcccagatgcgccatatgggtccacccatcgttgatcctcaactcattttgcctcatgtatagctgactcggtgaaacttaacccagcttttgtgttagtgatttctataaatgaagtgttctcgcccatgtcttgcacagtataaggcagcatcgtcgtatccaaaatccaattatcgccagagcaagtccaaaaagagattgcattatctcgttactaggtatcttcgaatcttacagcacagagacccagctcggaactccaactaatgcttttttgccatagaagatgtctcctgattacgatgttgcctttgagccatggaccatattttcggctgcgtcagtgaagcagtgttgcttagcctttgcagaggtgatcaagggactgccgcaaaatcaagtggcaaaggtcaacttcaacttccgcggcatttgcaatttacatagcactcgggcagcgaaggaaggagagaatgtatttgtgctgatttcggggaaggaggtagttttgaaggatgcgtttattgtcaacatatgcgcattgagccgggcattagtcatttacaaggcggcggcgcaggccgatcattttcgctcaagggtatcggtcgaaaagtgggtatcggtcgaaaagtgggtaccggccggatttccagctgcggtagatcgactcgatgatttttttgaggatgtcaacaatcttcattgtgacagagaggcgctgtataatggggtcgtgaacattcttatgggtttgccttgactcatttattgcttgatggcatcgtctcagttccaaactacctcacactgtcccacaatgattgctttgattcaatttgatttgttcctcgcgcttttcgcagccttgccctcagctttgtgcgctgtaaacttcggtacatacaccgcattggtggatcccataatacgacagtgttgtcagacggcagtattcgcaaacacagatggtcaacggtggtgatctcagacagtggtgcgctagtcgacaattgtaaaagtcctttacgtgtactctcgtattgctactcctgagagccagtgtcgattaatttgacccttggaaacagaaaggggagtttacctttccaaaatgaaggctgccattccagtccacaatattcaaagcccgcgacgtaccctcttgtcgttctatgccacgtatcgcgcatacagctcggaggaaatcgccggttctctacgttccctgccttgaccgtccgttcagaatcaatcaataatcatcaatcacaccgcactgcggaggataaaggtggccttggtatccgagacaatatcggacccgtatgattgtgggacgtcttggactagctcgtacatcctgcactgaatctcccccgtcagtcaacgctcatgggatggctgctgccgaaaggatggttggagtcatgcctgctgcgaccaagcgaactagcactcgcgaggatatcaccccacgaaaggtcgttctaagcgatgataatatagatttctctatccggtctgataccagatacctgatagccctttctggaccccagtcagacctcaaccgtgatcccttaccaacagaacatggttgattgcatgaactcgggtacgcctcacagaaagcaacggccgccgttatgatggtggtagtggacgttgatttaaggaggattggtggggatagggtttatacttactgaggtatcggagaagaagccgatcaggtattcttaattgcatgcttgttcaaggtcttggtgatagggtggtccgtgtggtcagactactttgactcgcgacatgctcttgagaaataagcattctaatgtagggtaggttcaagtaatgcttgaagtcatgactttgactgtgtgagtcacaaggcctactgtaccgcattgctagtctaactcaagcgaactagaaatgactgatgcaattatgtcggtgcaaattgatgtgtggatgagatggcaaaactccgcgcacgcgcgggcgggcccgcttacaaagaagcacttcggccgcttggacttttcatactacttgggcttacagctgatcgattgttggaatgggaccgctaatttagcgtgaaggaaaatatattaatccgtgtcaatccgcttttcgaccatctatctactcagagcggtcttggcaaatgtcgagatctctctttaaactaggatatcttcatagcttataatagacgttcataaagaccctgtaaccatcatgtatagtcttatctttatggaataattagttattgggtcggaagctgttatgctgggttcaaaagaatcccggcattcgctgatgtctgacattcactgatctctcggaattcggattaatatattcctccgtgccaagaggcgctacaaattggcggtcccatttcaacattcgatcagcttgccgatactacttttgaattttttaaccacgtaaatgtcagagaatgacatatattcaaatgatttgactaaaattatatataatgaatatattcggcttaagtggaaatcaataagggagaatttataaattgaattgtgattcaagatacatgaaagcagttaatcctcgcgcatcaagtgtatatatataatcgcaaaacttattgaacctacgaattctcacacaatatactgtctacctatcgaatggatagaactattacggaaatgacatatccaatacactatatagaaggatacaccttcattctaatcaattacctaccacattagtggttattgctggcagatgacagttgatgacgacgtaattaaccggatagatttccaaagttgaacgccctgtttaagaaacttacataattcgatggattccgattcccgccgtgaggtattctccttcaccgaccactcacgcactcaccacagcactcaccacagcactcaccacagcactcaccacagcactcatcacagcactcaatacagcactcaccacagcactcaccacagcactcaccacaacagcgtatctcaacactcaccacaacactcaccacaacactcaccacaacactcaccacactcaccacactcaccacactcaccacactcaccacactcaccacactactcaccacaacgctcaccgtaacacttatatccctggctactctataccttaatggctgataccgcaatcaatggcggcggaggaactccatcggatcataaaacaccacagcacaaggaaggggaatacagcacccgatgaggaagaactttcagttgtcaatgctacgatcttgatgattgaatttgcgagatctatccaaattccattagatctttctaatgataatttcttcggaaaacgagactgtaaattgctagaggccttgttctaatatagccccaaacccgggacgattgtgattccttcggcggagactggatggacagccatatgaagattgcagctaccaagcctcatgatctggcttctcgtcgatcgtcactcccctcgcgagagtatggcgctactgtcacactctgatgttaccaggcctctctgtttctggtccatagaatgttctagaagctggggatctcccgcatccacttttccaatcgatatattcttttcgaacccgacgcttcctctctgcatctgctctaccccgatcactagtccgataaccccagtaaatagctcttaagaatctatctcaacttcggacgcaccatatgggctaaccgaaatatagtctgccgattttgcactagaagccgggaaactgattggctcccgagattgtagctcaaatcctaattattctggacgatcgcgtccccttaccgaccgagggtttccgtggttcatcgaaactcgttttttaagatggtggggttcaatagcggatcgacagccccggtcttcattcgacggtcgttatagaccaagatttattggtcctaccattcttgtgttcgcgcttcacaactagggcgtggatcggaactcaatgtgtcagcccctgtacgatagatcactctgcttccaacacacgtatccacttaaatccatctagatccttagaaatctagcatattttctcgagctgataagagtctcgagcatcttaaagagccccggaccaccatgtcatgatctcatttctaggacagcactacgatcctcaacccattactttgaatacccctcagtgctgtttcaatcccaagaaagtgtgattgttcatattccagaagaatatgtatgaagctgtacatacaaccaggaccaatccctcatgctacgcctttattgctgagctgttgaaccccgcccctcgtaatcacataaatcaagctagtttattggaataggttgacaatctgctttaaatcaccgtaacctgtatgccactagaatgctgctcgcattttgtccactggtatctcagcttcctggctgcacagacacgatgtacatagtcccaattacaggatgacgatcgtgttcctggaggccggtaataaaccggtactagtgtcatgcgacctgcaacaaggtctcagcttgccatgagcgaagaatatataatgggtatttcatacctggtctggagcttttcgtttgagttgattcactgccgcgggtatggctaggctcaaccgttgggaccgtttgaagccatttatcaacgcttccttgggcagtatttgtgtctggaagagactctagtgaagccatatcacccaccgagcgatgaatggctcctgatcgttttctgttgcctcgatgttctggagatccggcactagtgcgacggcgcttccgcagaatatggtacttcttccctcgtagagattcaacggttcggactacccggtattgttcataatacgcgtgggaacgggctttccacgagagcgcccgatgggcatccagccaggggagaagatttttctcctcccattctggccagcccattgcgctacgtggggacattatgggggtcggaaaagtggtagtagtggtaagaaacgggtgaacacaacagcagaatgcgaacttgcagatacaggtctgttgggagtatccaatattaagtcaactatgaaacctcccaccgttacatcggaaaataaccattgcgtgattatgagccatggctcagcctggtgggctggtcttggactctcatctcactattcgcactgatcatgtttctagagaccgacaagccctcaattgttgaagtatcgttggatggtggcccctgagaatcaacgacgttgaaatgacaacagcaatgggagaccctctttgtgaacgatttcaccattgtattgaaaatatactcgttgagactgtccttccgttgaagttttttttttacaaatgatgatccttccgttcatgatctagagccgctgatattctattttgactagcaatatgggaaatcaggggcgaaatataatggcctcaacggtgaaagctctgatcatctggcgagtgattttttgaggttcgaatgtggaaaatagacctgacaaattctaattataggcaacaaatcatttcaatttcaacgatacaactctataaatacttgcgcctttcccccattgtattgaattagattcaggttcactcttgcctcagtgtgactcggccgcaggtatgaagggaattcgaaaagtcccgtacactgatcgaggaaattttcggagccgattgcaacgtgcattatcgttgtcttcctccgactctgaggacactcgcagtccgtcaaggtccgtggcaggcgataccacagaggatgagccttctttcccggaggaaaacgactacggcggcgatcaggaaaacagcaacccagctgagccagaaatggtgagcatggacaaaacggatttagaggatcctggacagattctgttctctggggatagcaacacagttgctctcgaatgtgtggcggagtaagtatagacctcatcacagaacatgactatgtgatttgcctgctgacaatttctagactcaatacccgattgaagtcagttgcgattcacccccgagtgagaacaagaagcgctgatcgtctatataggtccattgagagctcctcgtatgatcaaagcacctggaatcaaaccgttcgtgacgatttggctggcatctttgctcgattggcgatcgtggagactaatattgggaaggtgcttgaagagcgtccaaaaaaagttacagtggaccagaagagcgggcggtcgcttcgtcgccagcaatgattcgaatgaagctgtacttatttattccattatgttcaccagagcaacatactgtaccttttcttcaatactttctacacccccaggcaatctgaaacctggaaatcccaggataatataaaggcctctgtgactctcattttacttacctacacacgacaccaaatcaatcgggtatggaatactggacacgggacacagcacataagaaatctttgaacttcaagctgctacaagtcgtctgaagataaggaaattgcgtttctccatgggccactatatttagacgagggaatacacctttctcctcagttcaagtattgcaggtcatctgcatggttagtccaccaggctcccacttggatctgcgcaatcaaaaacattcccaagaaatatcaatctagagtataagaaaatgacgaaggagcttgaagcaagtgggcttctacagaagatgacggaaattgacagtattcacagttcggaactattacccttagtatagcataacgataatattgcgtaagtacctttccatgaacaatttgcgcgttggctacattgaaacacattttatccgcataaaatacaggccaggaatttcaacgcagattctttttagaaaagagattgatcttgattggccgcaaacggctcctggtgactagggagcgggccattcgattcggagaggccgaggtgtacttcgtggctctcagtagtgaggccccgctgctccggccagtctgcgtgaattacaccggagcctggcaaataggatgccagtcgtctgttttggagggcatcgattgtattccaaaatcgagtggtcattgctaccatgtccccgtgtgcctgatccaacactagctggatatcattccacgggatcaagtcttgcagagcggtatttgtggactccagctgctgctgcaacttacagatctcttgcccaacccgctgactatcagctaatgcctcgttccttactgtgatagctagctgcaatttggaagtttcttcggccttctccgcttcaagttgttccagcaactgacaatgcttgtgtctctccccgtccctctcctcctgtgctttttgaatctcttcctcaatgctgctcaccatccgaagacattttctatgggtctctttatcatgttttggtcgaggcctttttgtgatgggggatacctagcattgtgagtagagagtacatcaagacatgccgccagggtagtgctggacatggcaagttcagaggatatagacagaaggtagcgatcgggtaccggatgcttgcgcaacccaatcgcatgtttgagagggttccgatcatctttggacccagagatagcagaccgatgggaattacacaaaggtgcagtagcacgatactgtccttcgtccgacctatggcctgtctttctctgagaaggcttggtctttgccatgcttggcatgtaagatcctctaatggacaatggcccaaaggggatggaaagggtgaaataaatataggtagtgactatcgagaagctgatattatataggaatacggacaggcccaggcccaagacttgaagctacggttttactcctgcccaacagctgtgccagaattaggaacagaaaatcaaaatgttgagtactgggcatgagcgcgaacgcgcagaaaccctactacgttattatgaagtatgtgagcaagaggtaagcacaatcatgtacgttgatgcaaacaacgctatctcgtgatagaatggtttaatcggcctgatgtaccaccaaaaagaccaacggctcaatattattatcaaaaaaaaaaaaattgtgagtgttgcccacgttaacgactctgtaaattgagcctaagaaatggcggcgttctttcacaaatgtcccaattccggaattcatgtccgcagatatatggatctttaagaagcagttacttgaggtgagatctgattgacaagtattattgatcattgcgcccttgtcactggcgcaactataaagaaatttcgtactagtatgagtatttatcaagtgtcccaccgatatagatataactaagggacaagaatccccaatgctgccgatcaaacgacaagtccggtacagacccgaaataccataaaagtgcgatgggaactcgaagatatgtcacgagataatcatagacctcttttcatatttgataggcgatcaggggtgtagctacgaggctagtgaagttgatggaatataagtcgtatgtgaatcgagatagcagagcatcgaacgctgaccggtgatcattttacttggcttttcgaggagaaagcgcaatgtctgatctagaaattgacaggtccaattttatcattgactagaaatttccaatataacatggtgatcacaatttataacgtaagtcactgaagccaccggtgcatactatagttatcctgataatctacaacgttattggcctcggcatatattgcgttcgtcaagcacccggcttgagactcctattactcattcgctggcagcccctttcgtaatctattagaacatcttcattgctacaagatcggtaacattttgaatctagatgagtctcgtatcaagatgtagcgcgtactacgggaggcatgcacgcaatgcggctcgcagcgcatttccgtgatctatcgcgttctctctagtccagctcagacctcgctcgctaccgcatctgaggattggctgtcgcgggtatcacatgtgatctccaatccttcagcatgtaacgacctcaatgtcagtattgctccggcgatgccgctagctcgtcaagcaggttcttattttgcgagctaagagtttgtatttcgtggcggagttcatttaactagtgcccgaccctgagttccggcggaataacaaatatccgaagagcatgtgactctagatgtcgaaactcacttccagactacaattagttccgatgagactaactgatagaaaccatatatatggcaagcgcactgatgaagtcacaatggtaaaattctctagctaatcaaaaacaacaacgatctagttttgacaatctggtcagacataatcaggaatcaaatgcataatacacaagtcacatatttcatcggtaaaaagaaagtatcattatcatcctgtttcttgacactatctctgaaatatacatatagcttcacatcgcaaaataccaacagctcacttttgtatccttatgtctcgttacgggatatatataatgcaagcaaaattccccagtccagaagcataagagcatatgctgccaccagtaggacctcaatcaagcttgatttctcagcatcactttggcggtgaaggtgggacgcccggcttcttgacgcctgtagtatcgtatacgccgcgtctataaagctcagcttagcttagtcggaaatcccagtcatagaaccaacttaggacgaatcatagctggcccctgcgcttttcaagcgagatgtaaggattgatctctctatagacgaaaccaagttagcttagatgtaaagatagagctcgcggatctgtatacccgagtccgattatgaagcaatgggaggctgtagagtgcacataaaataagaataaaccaattcacagggagcattataaaagctagccctatggtatccatatagtaaaagctagggagacggcggatgaaaagatttcttttctatagtgatctcttatatgacctatatatgacttcgccgaattagtcgcgatattccaggggctatgttcttcagtgaacgcacacgcatgttgttgcaaaagagactattgccacgatgaagcttcggtaccaggccgaccagttcatcgggttgtcgggatcattggactcccaagtgatctcaaagcttggggcccgcgtggtaagacgagatacagcatgttcaacgtcctcgaagccatctaggtcgtccatcatcaaagtgcaaagggtgcgttaaagacgacttgtggtggggtttctattattataagaaaaactccatttcttttttttgtggtttttatcttatttcatttaattttgccagagctcaggacagtctggatgcgtcggcctggtgctagctaccggtaaccgccatgcccgagcggcaagagccaaatccgatgacccaccgggcaaatccttctccgcggccattataccgttatcgatacaatcctaagatattcggtgcgcatatcgttgcataaaaacgctcggacgttgtcttaactgagtttgttgacatacagccaaaattccgtgaagttcgtccacgtgatacggaggttcacttggcattccgtatccacccgcatgctccttgatatcaatcaacctttcaacgattttccggtccacatctcctgatcaacatattatacttaccaaatgcgtaaattgagttgtgttgtattcaataatatataatctcagcttcatatcttcaataaccccggggcagaaggctaatcgcctagtgcttgagagacatgccgtcttggcggatgagccgtgtcgacgtctcgggatatatggcactgcatttgttgggtgctgcttcatcctatcatatagagtaggttccaccgaatttctgtccataagcaaatccaattctagaagatgttgtggaggtcatcttggaataatggcttacctcatatctccgatcttatacgcgtcaagttttaaaacggggagtcccaattattgcaggcaagatgatatatctccagtgtctactacttcatacataatatcgaaagcatacatattgaaacctcatcttgaataaattgaaccgctctccagggtccgcgaagactaatgaacggccaagggatcgacagaagtacaattgactaaccgaggtttccgccataattccgttcggacagaaactgaacgctcaatatgtcggtatcgctgaggtcttagttgacctgcgcttgtatccatagagaagactgaacagaagtgatcagcgcggaagggagtctgattggaactagtgtcgcaaactgagtgtcaccacatggacggaggtttgatcagcggtaggttctacaggcctcgccaatcgcaggcctttgtcgagtttcgcggtcaagaacacgttcttgggctcttggcgggagcccgattcggaacagagtgtgatgagctccacagctcacctcagggataaaagcaaggctcattcgtctctggaataatgcactcagtgcgaaaacacggacgcagaaaaccgcagtactacgcaatgcctcttaccaaggggaaaacagctttcgtgacgggtgtgaacgggatcagtggccatgctatagtggagcatctgataagagaacctgaaactgagtggtgagagctgtccacatcctgcaattggtttcattccagtctgactggcctcccaaggtcccaaatcatcatttcttctcggcggccgttggcaactcactggatcgatcctcgtgtggtgtttgtggccatcgatctcctcgaccctactgagaatatcaaacaatctctgtcgacactggtggagaatgtcacgcatgccttctttacatcctatgtccacacagctaacttcgatactctgcgcgagaaaaatatccctctattcgccaatttcatcgatgctctcgatgagctgtgtccgaggcttgaacgtgtctgcctgcaaacaggtgggaaggtgagacccttcacagcactgatacagtcctgtatgacacctaactatctatatagaattatggcgttcatcttgggcctgttaaataccccctagtagaagatggccctcgttacacggacaagaacaatttctacttccaccaggaggactacatgttcgacgtgcaaaagaagagaaaatcatgggattacaacattattcgtccgaatggaatctttgggttcacacctcatggtgagtggatttaccacgtttcctgttggaccatcttgaccaaagctttgaattaggttctggcatgtccgaagtattgtcactggcgatctatttcttggtgtgccgggagctgcaagaaccggctcgtttctgtggcaatgagttcctgtggaccaacgttgacaacaaatcatctgcatggggcctggcacacatgtctgtgtgggctgtgacgcaggttcaatgcaagaatgaggcattcaactatgtcaatggggatgttttcgtttggaaaaatctgtgggctgatcttgctggctatttcgaagcagatgtgaggccctcctacggaatggatcccccaatattgatttccgagatacgctaactcatccaggcccctgaacctaaatttatgaatgctgctggagtttccgacaagttgacaaatgagttcgatatcctcgaatggtccaaggataagaggccggtctgggaaagagttgtagccaaatacggtggtaaggttgaggcatgggattggacctcttgggactctgtgatgtgggcaatgggtaggtcctggccaactatagcgtcgatgagcaaggcaaggagattcggatggactcgttacgacgattctcatgacaactattttcaaaccatcaggagcctggagaacgcagacattctgccaaaaataacgaagcggtgagcacctagttcagccagctaagatcgtcgtcccttttgttttctttctgaaaaggaccgtgtgattattgctggatttaagctgaatagaccaatgtagtgggtgcgtctcttaagtagacccggtcgcttcgtggtgggtagtcaagaaggtggtaaccggctatcttcaccgtagggctcttttcatccgactgcaggcgatttaggcagaagcggtagtgcaaaagccgcaagctctagtcaataacgagttccgtaccacatcattgctaggccggtacatagaactcagtcttaagagataccaaattgaagaatgtttccaagatggggcgaggtccacaatacccgcaggatcctcacgagctcagaagcgctcaagaatgttccgtattgtgaagatatgagatcatttctctctagcaatcaactcaatatcaaagatcccactcgggaaaacatgcgagataattgggacacgcaaaagatagtgaacagtcaggccagcactccaggtcttcctctactggtgaattgacgctaatggccaacgaggagtcaaaggtgtctttcaccggcgatcagtcagacaaaagtgacccggaatatagcaaacaggagtatgatgggctaataagcagctggaactgctcggtagccgatgactgatttgcttggccgtatcttttgcgaaggtttgttttggttcaacaagctctactactctaggcagtacggtcactgttcataagtcttgacaagcctctagctccgcctgtataccgctcatattaaacattgttcatggacttcaattataatatatatattgtattgttaagagcccggggtggggtggccccgtaatattggaaacttagtttatcacaaagccttcggatcttaagccctacctaatataatcagcagggtgtggagcctgaggggttcagacctttagagccaagtgtgagccaaaggtacagatactgttcaaaggcgggtgaggtccctccgtgaggaggttcgactattcaaacaccccccaccccaaaaccgaagccggtggtatgcctttcataaatcttaactacattcccttctgtgtgttaatcatggctccaaaaattactgttgtcttcgtatgtctgccattaacccctcgttctcgtgtttccctagattatctcctttgtagtactcgctccgcggccatatctagaagcttgctgaggctgaaaagcagggcattgagtccgccggcgggcaggctgacatctttcagatcgccgaaacactctccgaggagatactggccaagatgcatgccccgaccaagtcttcctaccctcttgctcggccgaacgatatcctgaagtacgatgctgtcctctttggtatccccactcgcttcggtaattttcctgtctagtggaagatcttctgggaccagactggctcgatctgggccaccggtggctgttggggcaagtacgctggtgtctttgtctccaccagtagtcctgggggtggtcaagaatccactgctctatcctcaatgaccaccctcgcccaccacggctttatattatgtccctctggactacaagcccgcaatttccctcctgaccaacctccagaaggtccacggtggtagcccctggggtgcaggtactttcgccggtcctggcggctttcgccaaccttctgctctcgagctatagattgccgagacccagtgcaagaatttcgacgaaaccgtcgccaaggccagttagttactgcatggcagagcccagtgggttcccacggttgaggctgtaatagttgatcattatgcgaaaaacaatccgggcagtctgtccagcaacagtatggcagctaagaaccagtgagatataagacgaacagcaaggcgccgtgcgctgttttcaagaaaggtgctgtcatgtggccgggaccacagcttacatgatttttttttgttggaacgcggtcgttacagcacggactagtacaagcagagccaattgagtacttgagagtgtgatctctacatactgtagaaagtgcagattaaatggggagttgagcttagtaaggtccttgagagccttagggtcatcaggcagatgggggcctgaatatttctcgggcgcactagttaagttacggtcctcgtttgtcgacagaaaatttcaaactattgactatattcgttactcgctattgcgtgttcgctttttgtgagtggaactgcagctctcatgtggctgatgcacttcccaaagctcagggggaactatccctggctgatcaataaagtctttctgtaagttagcaacccccacttgagagtagtcttccgcacgatccagtaaaacccagacccaacccccaccccccaaaagggctggggggcccaatgggggtnnnnnnnnnnnnnnnnnnnnnnnnnnnnnnnnnnnnnnnnnnnnnnnnnnnnnnnnnnnnnnnnnnnnnnnnnnnnnnnnnnnnnnnnnnnnnnnnnnnnnnnnnnnnnnnnnnnnnnnnnnnnnnnnnnnnnnnnnnnnnnnnnnnnnnnnnnnnnnnnnnnnnnnnnnnnnnnnnnnnnnnnnnnnnnnnnnnnnnnnnnnnnnnnnnnnnnnnnnnnnnnnnnnnnnnnnnnnnnnnnnnnnnnnnnnnnnnnnnnnnnnnnnnnnnnnnnnnnnnnnnnnnnnnnnnnnnnnnnnnnnnnnnnnnnnnnnnnnnnnnnnnnnncaacccagacccagtaatgggtctggggccccaaatggggttacaaactaaacaaacatgctcaggattccaattgtataacttacgcattttcttgtggtaattttaagtattcactttacttgattaaagcgaattttattgatgaaaagggtgaaagagaagcgttggttaagaattcctatatcaagctaatggtatccaaatatatcatcttcccggctcttacgattccgccctggtgctcgtgtctgtgtacaggttggggataatgatggtgagcaaagacggacatgttcacttgtaggcgaggaacccttctccggtgtatcttctggttcatcccccggttcatcctccggtcctctgtatcgctaattggattgacctcaatcttactaagcttctcctccctttcttcttttgccgccttaagctcacctggcgagattctcgagaagcttcacttcctgctcctctatatcaaatttcgtcgtacaaagaaacattattaacccctcaatcgtctctgttttcattctaccacgagggtagtgacagatacctcgagcagtatcaaagaggtgtttgattcccgcgccagttgccgggaatgagagtacatctcgcgcaagggcagcaatagctggaaagcgagcttcgtgctctttccagaaagtaagcggtctaatacaaatagtatctatctatgggttagtatcgttatagtatacaatctttatatttacttactgctatcaagatattaactgatttcattagtaatagctcgtggttgtatatcccttccatcaagtatctcttccagtcttgagcctggccgaactataatcggagagctttgtggatcatgaccactacttctaacttgcgcttgatatggaataagggcttgctcaaaagcaagccgataggtgtcttgctatttctgatcccaatcgctggagaggaagaatttgaatttgttcactggtgcaagcattgtactgattgcatagatattttctcgactatcatcagcttgagagtaatactcatcaaacttagtccgaccagcttcaagtgcttctaacatctgtttctcttatgggacgcgctttcggtgtagctgtgcctgtgatcgctcaagatgatcaaacagtttgttatagagcttaaaaatatagtgggcagcgacatctcgagtttttgatagctgtgttgtgtagtcaagaaaggctcagtgatatagagaagatagtcgatctgacgccactcttgctcgcttaagtagcatctcctcacaatcatactctgtacagaataaagagaaaatagcacgtagcctctttgcccggcgaagtataaagaatgtggaactccatcgtgtcttcacatcttggattggaacaatctttatatttgttgtctgaagattgtaaaatgtctctcggcgctggagacttgcattaacgtaaatcgcaagataccggactttgttcaatgtggaggagatctgacattgcttcgcattttcttgggctagccttgactgcttctccgtccactttgtctcggctgattcattcaatggaactgccttgatccgagtaagaagctgatttaggcagagctggataacatgtgcaagacatggtattcgggcaataataataatatcatctgacaaagcctgttggagagaagtagttaatgtcttgttgcttgatgcattatctgtcgttaacccgaatactctgtcttcgatgttatgctccgctagggtttctaacgtaattcacaagcgagccgccaccacctccaaaaacgcgtccatgaattagcacttagctagttcaaccacccaccatgccaccaatatgctctcaatcctctacaaattcagtagagcaagagggtaaaatcttactagctatccaggcttttcaaaatcaagaatttaccaatatttccaccactgcccgcatttttaacgtaccgcgttcaacacttcgggatcaccttagtggtacaaaacaccgcgcgacttctcgcgctaattcatctaaattgaccgcaattgaagaggaatctcttcaaaaatgaatactctctatggattctcgtagatcaaccccccgaccctctatgttacgagaaatggcagatcttctcaaacatcgccgaacgaccccggttatttcagttggtataattgggttacaaatttcgttaaacggcatcctacccttacatcccgattctcgagacgttgtaattacgagcgcgcgaaatatgaagatccaaaaatcattggagaatggtttaatcttgctcaaaaaaccattattcagtttggaattaacccggacgatatttataactttgatgagaccggatttgcaatgcgattaaccacgaccatgggctgcaccaaggtgaagtgggtgtggaaagacaggacataagataaataggtgtccagataaataatcctgtttagtttaatcaatttaatggcgttctggttgaaatatattcgttagaaaactatactcttgggtagggtggcggctcgcttacagtggcggctcgcttaccgattacgttactccggattaattgcttagataataccatagttaagccttggaagctcccgagtctggagaagtctccctaattaggcctagtcccaacttatactcgctaattctgctaattctattggcttgattcttataccgtcttttagaattctgccggtctaagtatgattacataatgcaaaatgaagccttacgtaaccaacaatgccaagacttagttacaaggcttgtagcttcttcgactgtccaattataccctggcgcttacttagcgggtacgtcggcccatacgggccagttgtgcaagtgaccctcggggtcgtaacagatagactgctcaataacagccaaattcatgaaggagtatgtctctacttgtcctttgaatacgcacctctctgattacagatcattggatcgccccaccgctggaacttgacttgtgatgcctgtcccctgagactcactagagaggattggatcctggctgggctgagctgcgacttcgcgctgaacttggtctatcaggtattgagtcgcaaaccgcaggcgctgcggaccacggggtttttgggctcgaagatatgtacatttgatacgagaattccggcaaccttggcatgggtgaccatcccggcatcggatcttcgagatttcagtataaaccgtatcctatattctaatgagagtagtgcgatcccatcacaatccttacctttcgaatcttacagccatcgcaggcggtcttagttgcgggtgatctggcagacatggtggcagagacgctatgcggggtacactatacgtcggtcttcggtgttttacaactgcagaacttcaaaagtcgcatgggattctgccggaacggaagctgttgattgctcaagtagattccattacaaagaacggtgtcatcaatcgattgcgtgactctccacggggcacgccatagggactagacccacctagtctggaccgtggcaaaatgttggcacgcgatgattcgtcgcattcttttgaactagggaaataagccaataatcgagtggataatgaatgagaagggtgtttcctgggaagactgctagaattgaattgaatcttagttgatcccgaggcacatttttatttcaactagccgacagtacgaccgttttaacactgcaaaacagccgataccgagcggttgtgaaagttgcgatgaatgcagaggtatatagattagtataatatgatttccgccccagatttcatcgaacttcggggttaatggcttccgttaccgcgagtactagaagccgctaccttcccgttgtacgtgaagaagtcgctggaataaggagcttttgaggccaacgaagcccatttaatcagaggtccaacctttttgactaacttcaaaatgccaatcgttggggtcatcgaaccaagattcaataaagactttgcctttaaaaatcatacaggaggaagcgcctaccccgaggcatttgtacactaaattgcggttacctattctcgatttcaggattataaaaatgctcgccgaggatagtattcattcctcgtaatagccttcgccgttgcggttaatcctaccgcgaaaccggtctcgtcgaagttataaacgtcgtccgggtcaattccaaattgaatgatttgtttttgaacaagattgagtcactatccttcaattcgaaatcgaccccgatgacgtttataacgtctcgagaatcgggataacagggtagagtgccattgtacaaaatgtaaccccatttattaccgaccgaaataaccggggtggttccacgttgttcgagaagaagattcgccatttcttgaacagtagaaggccgggggcagacccacgtagatccatagagagaatacatttttgaagagattcttcttaactctctgtcgatttatgcgagctggcgcgagaaatcgcgcggtttggaggccccgtagtcggttttgaagagtggaacgcggtatgttaaagcagcgcgctacctcacgaagtgaagaaaattcttgctttttcaaagcctgaatagccaacaagatcctaccctcttgctctgttacatttgcgggggattgggagcgaatcggtggcatggtaggtggttgaattgactaagtgctaattcatagacgcgcgttttgggtgggatggccggctggcctacatggccgattcgcttgccgattacgttaacgttaagagtagaggatggtcagccgataaatgatgtctattaaagatgcccattagatatgtctgcaaacatgcgtcacacttaaaattaccataaataacaagtaactccagattagacagcaagcaacaattgtttgttggggacctatttcaagagcacagacggatattggtagtccaaagatgctacatatgagctcaagctttggacttgaaacaccttatctcaaacattttcaatggcgcattgtgcaacttgagctatttcttgcaaaaactggtccaagggctgaacgtcaagaaggttatccggagttgaacgagggactgacaactctgcgaggagccgcgaaacagcgtgaaggaggttactgtcgtattgcgccaacggatgcttgggatgctcgagaatattgcaaaaaagtgtaattgaggcagtgaccggataaaacaaaacaagcctgcatgatgtagtcagcttttggtacaaatcacgttattacaaagatcaagttctccacgaaaaggaacggaagccagaccagagacagcttgggaactgaatcacatgacgcgcaatttgcaggtatcgcaaagaagatcggctagcctcggtggcaaggaatgtactggaactgataccgggactagtcgcattgagtgccttctcctttcccatgcaacggcttgtcgcctggtggataacagtcacacagtggtgatattccagccgtatgatcaggctgcgtagatccaattgatcttgatcccagtgtgaaacttcagaaaaggacagactcggtcggtatcgttccggaaccgtcatccgccaggcttccaaatccatatctaactgccggacagctgtcaagagctccgcatcaggcttgagtaatgctgaagccgaatacagcgacttgaatacccgagacttgacctggctcaatttaatgtcactaggaaatatcctgcagggatgaagtctctccactgtttctagatctgcgcacagatgctccacttcgtatgcaaaggttctcaagtcacagaattcgtcaataagcataggaggttgccgcgttcgaaatgacatctccttatcgatagtataacaaatccagaacaaacaccgtaattgtcttctggtgcgaagcaaaccttcagctgaatcagtcttcgaggaaggaacaaagatttgattatgcgcccgagcgtgtaaatgaaatgggtcgttagagaattggtcgtagccgcagatttcagatttcccgagtagaattgatatgccaacttaggtatagttagttttaattgcaggccataagaatatggagaaagggcttaccagcatgacgcatgtttggaaggcctcaagcgtcatttcctcaagaaacacagggatactttggttaatcttggcaatgtagccacctatcttgtccgtcggggtcaaaggaacgccgatgtcaaagaaatgagctagtatcaaaaaagcgaagatacatgtcctcgcgccggtgattttggggctatcatttgaagacatgtaagcccaacggattgtctccttgaataaaatagagtccaaaaccggtaaaacccctcgaaacacggatttctggtaggactcggcgcattgctccacaatggattggtcagggagagtcaatctgttgaaagaccccatttccgacggttctgaacttgaaacagccgaagatcggtcgttccgctcgaccgtgtctagagcaaatttgcttttcgacaaaagtcggccagatctagcttgaatccatttttgcccttcagccgagaaaagaggaagtcctgtggcaagattgatcatgccaatctcacgcccagcagaatgaatcactccactaggttgagtcgatgacagcgagagtgttgggcccttaccaacgctggcctgtgactcgcttttcaggctattacctgatgacatcaatttagtgacatggtcgcactagctgcggggtcaggataatttcttctttcctccccattcctctctaaaaatagaggaaaagaaaggaacaagacaaacaaggaaagataacattattgcaaagaggttgaagaatgactcactatggctgcttgacaacggtgccttaacggtcttacgatgtaaagtagatgattctctgctatgtggtattagtacatgtgcaagtgtttttgcataggattgtctgttcctcgataaagagtgccttttctggcatctgttgtacgtgcaatggacctggtagtggcggcaccaaaagcagatcggcaatacagcattacatctcaccttaagataaacgattcgacattagtgaattaattttatcgggcatggtgatgcagtgtattgtattaccttgcgtttccaacaggaatcacaagccgagattttctgtcctcgatcgcctcgacgttccatggccacaaactcagcagggtccgttagttcagaggtcaatgcgacaataacgaagctgcatttatgtttgtttgcttatttaccggaggaaattagcttgaatgggtaccgggaggttgcgaaggaacacgtggataaatagaagagcatggaggagagctgggctggataccgcctaccagatccgatactcttacgtgtcattggcagattgttattatcctgcacaggatctccgggagagtagcttactaagcagcaagcgtcttgagtttgtggtcggttgcgaggaacatagggcgcactagcacgtcattgccaatggtcagatcggacagttcttgaggtatggtttagtttagatatgagagaacaaaaaaagggggttttgtgcttcaatagttgatgccttcggaactacccgcgacgtcttgcccaacaaccatgagttgttcatatgattatgacttccgctagtggtcgtcgttaggactgctcttggaatattgcggcaagattagtggtatttttcttgaagaaacgtttaatacaccgaattctaacgccgatctatctgattttgcgaacacaactcagatctctgccgccttgatcgcacatacaccaatgagcggccctataattgcaatgctaaggattgcggcgaaagcctcgcgcaacgcaacaccttgacagcatgctcgcagactcattgcgtcgaaaagcctaatatttgtgatcaccagggctgcgatagagttgtttcagatatgacgcaccctagcccatggtcataacccatacattaactatcgctgacgcttggtctgtcatcgcctaagcgacatgggaaagcggcattacatctgccacgagacgaattgcgaatggaggtaagcaaaatgtaaaccattgttcaaagaaccccaccgatttccatttatcgcggtctttgagtacccccaaatcccagatgggcgcaaccgcctctaatcgtgcaagttgtcagccttcaagtggacgggtccaaatcctctgtccatgtctactcagtctagcgacattttcctacacatgtaagtgttcgctgcccctaaagaagtgcaccggatagggtttcggacagcacggttagattggacatctggcgagagtacaggagagcatctgttcttcctgccccgagttgagacggccacgtagaatctccatcgggtacacgaacagttgctagacactatctcccggcatgttctttggtgcaataggcactagcttttgactgtccctgtggcctcgtatggcatctctaccacaacccagtcacttgacactttcttcgctagctgcgctaccacgacggtatcccttgatccgaagttttcaagtgatactggcccataacatgtgggtttgttcagagtccagacacaaggaatataagctgcttttcatgctgtagttctccttcaattacaacgtcattgaagtatttttgcttctaaacaataggaaggacaactccgaatagccgatccctcactcttctcttgcgttatccatgaagcttccaaattgcgtctggaagggggatttcagttctcaagtacgcgtatcacccgatcccggaatagttccaacgcctgttcgagaaagcgcagccggaatagctgcttgtcgtggcgaagctgaagaccgtccccctctttgctcagatgtgtgccagcctctttcactatctgaattctctgctctagcttctggccatggatttgcttggacacacatggctccaataggcatctatagagtccaagaagtccagctgctggaaaggtgaacttgggatcgtggcgttcgaggtctgctagcactttcaagatgggttgaaagggctcgttcgccagggtatgtcttgattctgcttcctgttacgaggaagtgggctgcaatggtcagccagaatatttgaagttcctgtggtttgtctttttcgctaagggtgggcaattcactgggctgctgatctccttcaatttcctggtctgtcgagctgtttcgtgcgtccattttgtccgcaggagaaggtcaagatcttggcaggaccgtttccatcggggctttatgtcccttatggacaagtcatgcacacgcaggtggctatggacttggttttacaatcaccactataaacagtcaagttctgactggagtttttttgcattttagtgggctgttgacaatgtattcactaataaggatcgtcggttggggaaactgatcgagcctcacgatcttgagggtcaaagtacgaacgcttggtgaagatatgtatgtcaattcgacacctcttccaaattcgttgaaagcctcatgaatccgacaaataaaacgttgtagaacttgcagtgatcaaacaagaacttcaatgtatcttcgaaatttgagtgttggcaactatggctaagcttcaacgggttgataggtcgaacagcttacatttgaccgtaaccacgctttttgcagtctagacagacagatccgcacaggtcaacacaataaatgcaacactaaagcgaaaaaaaaaaatccaaaaatccaaaaattcatgatttctcgggatgaaactgtgggcggtttccgatgattcatcgttagatcgctcacagatgaggtgatcagaacgcgaaatataagcctgccattgcggatggaatatcccccacaaagccagttagccaacgtttcttgacagactcagcatcctttttcttgataccactccaaattgtctctctcgctgaggatctaaaggcatcaagaatgtcgttgcaaatagttgcggtaaaaagaagacatgggcttcaacaggcctcaattacgagaggcgcccccaaacccttctaccaagcagcgcacttgcgcaaaaagactagccgacaagcctataaatacgtcgtctgcctccggcaattcactttacaatttattcacctgactctgtaaagccgagcaagtctgtgtctatgaaggggaggtatcgactttcaatactcgacggccatggaagccatttaacccctaaattcgatcaaatttgcgaggataacgatatcataccaatttgtatgccaccgcattcttctcaccttttacaaccactcgatatcggctgttttgcggtcctaaaacgatcgtacggtcggttggttgaaacgataatacggcataggatcaaccatattgataaacttgattttctcgaagcatacccttctgcacgaattgaggcttttaaaccagagacaattaaaaatagcttctcggcagccggtttattaccttttctacccgatcaggtactttcgaagctaaatatttgtcttcgtacacccccacccccaagccgggatagcgattgggacccaaaaacgccttcaaactatattcaactacaaaagcaagcttcgtcaatcaaagcattacttcgtataagatccagaagccctccgagtccgctaaattcagcgatcaaccaggttttaaaggcatgccagatcactatgcaatccgccgcatttctcgagaaagaagtaggcgatttacgcgccgccaacgagaagcagaagcaaaagcgtactagatctcggaggcatatacccgccgaagaaggcctttcagttcaagaaacaattgaagcacctccccccggccccggcatgcctggagaatctactattcagccacgtacgcgggccccccccccgggggtgtggaatatgcagaatgccagggcatagaagagaaacatgtctagatagacgagttagttagttgatttaatttaatggcgttatggttgagataacgtaatccactaccgagtgacgcacccccacccaacttcctgaattcaaatgcatttatctcaaccaaaacgccattaaattaaataaactaaaatcatcatctatctggacatgtctctctcctatgtcctggcttcctacatattccacatgctcgtctagcctgggggggcggccttaaaccttccgaaacctgctcacgatagttgttgatacgcgctacttgggcctcaaatgactctgaacgtagctcacgaacatcctgaactgagagatccccttcgtggactatcgtccttatagatcgagttcgcttttactttttcttctcgttttcagcgcgtaaatcgctcacttctttctctagtagtgcggcagaatgcatcgtgatctggcaggcttttaaaacctggttgatagcggaattgagtgggctaggagggctccttgatctcgtacgaagtagtgcttttattgaggaggcttgcttttgcaattgcacatagttcgaaggtgtttttgcatcccaatcactaccccggctagaagggggggtaggggttcgaagacgaatatcaagcttcgaaatcactctctccggtataaaagggactaaaccagctgctccgaagctgtttttaatagtctgatttaaaggcttcaattcgtgcgagagggtatgcttcgaggaaatcaagtttatcaatatgatttatcccaacccgcatttttgcttcaaccagccggccgtacgagcgttttaacaccgcaaaacagcctatatccaaaggctgtaaaaggtgagaggaatacagaggtatacagatcggtataattttgttttcttcacagattttatcgaacttcggggttaaatgacttccgtggccgtcaagtatcaaaagccgatatacccccttcatacgtatagaagtggtaggaataaagagctttttcaaccagcgaagtccaatttcatcagaggtccatccattaggactaacctcaaatcgccaatcgtccgggaggccgtcaaaccaggattcaataaagactttgcctttaaaaatcacacacagtggaagggcccaatcagcagcatttatacacttaatagccgtcacccattcacgatttccaggttgtaaaagtgctcgccgactgtagtattcgcttcttataataaccttcgcagtcgccgttaatcccatcgcaaaacccgtctcattaaagttataaacgtcatccggatcgatcctaaattgtaggatagttttttgaataagatcaaaccactcctttataatttttggatcctcacatttcgcacgctcgtagttataacgtttcgagaaacgagaggagagaagaggacgtcgtttaacaaattttgtaacccaattttcgccaaccgaaagaaccgggctagatccgcgcttttcaagaagaagattcgccatttctcgtacagtagcaggccggggggctgctccacgtagatccatagagacgatccatttttcaagagattgctcttcaagctcagtcagtttatatgagttagcgcgtaaaatcgcgcggttttgaacaccccggaggcggcggcggagggtagcctcaggcactttaaaacagcgcgcagcttcacgaattgaagagattttttcattcttaaaatcttggatagctaataagatcctaccctcttgctcggttgaatttttagacgatcgagaacgaattggtggcatagtgggtggttgaagagagagggttatattaattgacgcgttttgggtgggggtgcgtcactcggtagtatgcgtcactcggtagttaaatgcatttaaatttaataggttgggtggggtggaccactcgtttgtgtggaccactcgtatgtgaaatacgttatcgtaatgtaatctagttgtccccgctacccagtagtaccttgccggaaagttgggcttcaccgtctgatagattcacgaatgaaaattttagctatattaggcctagtgtcgctataagtacaatttgagagaaaaaaaaatgaacaaggaaaaaagagttaaggttccaaaattattcttaagtgaaagtaaggatgtctttctctgaaccaatcaggaaataggtttagaaacggccattgaagacctcgtagttaacagagcactgattagtaaatcaggatgaaacgccgaaaattgaacggatctaaatagtaaaccgaaaccttaactcttgttctaggctgtttccctttagacatacaaccttatcgcattatgtccgattatttaacattcatctttgcccttctgggtgcaaatactcttgggtaaaatcactgcaaccctgctaagatgttaattaaattacctacttacatagacttcgcggaataccagctatactagtcagttttgtctttcactaacttaccacgcttcatctgatatgtatacaacgataaaccgttagggcttttataaccctgaccatggtagccttagggtctaattctagataccaattcattttttcataaattggtttatctgcgtatttacctcctaattatattaataaattacatagttaattacattatgtaatttattaatatgttacttgcatctaaaattgacttgctgacctatcatgcaaaaggtacgctcttattatttatttatttaagttttcacaaaaggtgaaggctcggggagagtcgcaccaaacctaccgttgtgtgggggtagacccacctagggtgcctacccattccgcgctgcctttcttcctgctgcctttcttcctgctgcctttcttcctgctgcctttcaagctgcagccacagattttatctctgcgtctccctaacatttgagcgagacaccggttcctgtcttgatcattttcaatcgtagaccaacaagtcgtcatcctcaacagttgccaacggaatgaacaagacatctcacacggacgagcccctcgagggtgacggctacaaccagaaccccaatccaaactctaaggacctgaccacgaatgaggactttaacggtcttgtcaacagtcgggccgtgcgggaaagcgactcccaagcactgtcaaacgcggcctcgaacgcctcaggggaaatagccagccatgctcctatccaaaaggacgggcacggcaaggccacctatcggctggctcagcggtcaattgatcgtggccagccccctgagggtggtatgcaggtacctgtaaccgcccaccccccggggtttccgccagcttcggctggtggtgacgccgaccctggcacgctgattcagcgcgcccggaagatgcttgctacctttggctccttcatcggaccgggctttatgatttcggttgcgtacagtatgtccagggcgctgtcgtcctgcagtctttcccttcacctcacttacatatgtgcacctagttgatccgggaaattactcgaccgacatcgctgcaggagcctcgtaccgcttccgcctattgttcgtcgtactcctctccaatatatttgccattttcctccagagtctggcaatcaagctcggtaccgttagtggtttgaacctcgccgaggcatgtcgtgcatttctcccgcgctggctcaactatatcctgtacgcctttgccgaagctgccatcattgccacggatatagcagaggtagacccctagtttgctccacgtttcgtatgttgtgcgtcgacaaatgctaactggccaggtcattggatttgctattgcattgaaccttctgattcctaaggtaccgctggtcgcgggatgcgctatttccatcctcgatgtcatggtaactctgttcttctaccacccagaagggtctatgaagggcctaaggtactttgaaatttttatcatttgcttggtactcgctgtggtcgtgtgcttctgcattcaattgtctctaatccgtggtaccatgcccggggaagtcttcaagggttatgttccgtcaaaatatctcatcgagtcggaagcgtgagttcaaaattttcctccacccccttcatctttatcctaatgtttttccagtatctaccaggcctgtggaattctcggcgcaacagtgatgcctcacagtttgtacctcgggtcgggcattgttcaaccccgcctacgcgaatacgatgagcggagtagactcttacctcgtcagcttgcatcaggatattcggttctagatgatggtatcgacaaaggttactacgtcccgtccttcagcgcaattaagcactcgctcacggtatcgattctcgagctggccatttcgctcttcacatttgccctctttgtcaactccgccattcttatcgttgccggtgccgcgctatacaacaacccagatgccctcgatgccgatatatttggtattcacgatctgctttcaaagtccatttcgcccgcggcaggtatcatattcgctctggcgttgctcttgtcgggagtctcagcggggattgtctgcaccatcgccggccagatggtcagcgagggcgcgctgaactggaatatcaggccatggctacgccgcctcgtgacccggactattagtatcacaccgagcatcatcatcgcgggagctgtgggtcgtgaggggcttaatgcagcactcaatgggtcgcaggtagcgctgagtattatacttccgtttattaccgcgccgctgatctactttacctgccgcgataagtatatgacagcctatcccggcaaagcgcgttggcgcatggctggtagggatgacgagagcgacgtggaccaagtaattggggagggagccgagctcgaacccgaaggtgtcaagatgaccaactcgtggtacacaatgatcctcgccgtcttgatttggctcttcatgtcaataatgaacgtggctaatctggtgttcctgggcaagtaagtgccacagtaccgcaatggcttggtggggagcagttgcaggagggtcactgacccgaggagagggatatccacatgacaattcagtttattgctcccaatcggaatcagaccgtgcgcacttgtttcgttggtacggagcgcaagtatgcgttgcatgggcggagtaatggaggattgatttcagggatgacgaaattcggaaaggagaaggcgagggaggatagaagggctcatcataagaaatagcactctcttcgtcctgagacatcaatatctagcaccttcatgtatccaatccgcatagtaggatgctgataatgaaaagggcctaagggaggggagtgaatgagcgatgagaggcactggcatgtgggatccaacacatgaatattcaatattctactcaatcagatatcaagctatgtttcgaaactagccaaatcaaaaatagaacagtatctatggaaacgaaataaaccgataatttatgtaatgatgattatacgtttttaattggagaatcttcgagttcgtgttccgctgcttcgtcatttgcctccaaaactgtactaactaggcaaccaatgttttcacgaaccttctcatctttgatagcgtatatcagcgcgtcattgacgaactgagccacgatcttcgagatcacaacgatatgttctcgagcagtttcagcccattacaatgattacacatagaacagctccgcaaggagagcttggttgtagttacccggtgactcttggcccctcgtttgatcatatacctatattaagtatcacgaaaagttttcctgcgagcaaaaagtcatacctatcgaattcagtcaaacatcccctcttttgtcacaaaatgttgtccacctttgtctttccggcatctgggtggtccgtacatcaacccaaattaacgtaattcacatacgagccgccaccacatacgacccgccaccccatccaaaaacgcgtccatgaattagcacctagttaattcaaccacccaccatgccaccaaaacgctctcaatcctctaaagattcaatagagaaagagggtaggatcttattagctatccaggcttttaagaatcaagaattttccaatatttctactaccgcccgcacttttaacgtaccgcgttcaacccttcgggaccgcctcagtggtatacaacaccgcgcgacttctcgcgccaacttgactaaattgaccgcaattgaagaggaatctcttcgaaaatggataatctctatggattctcgtggatcggccccccggccctctatggtacgagaaatggcggatcttcttcttaaacaacgcggaaccaccccggttatttcagttggccaaaattgggttacacattttgttaaacggcaccctacccttgcatcccgattctcaagacgttataattacgagcgcgcgaaatgtgaagacccaaggattattggagagtggtttgatttagttgtttgatctagttcaaaaaaccattcttcagtatggaatcgatccggacgatgtttataacttcgacgagacgggttttgctataggattgaccgcaacagcaaaggttataactagaagtgaatactacggtcggagatcacttttacaacctggaaatcgcgagtgggtgactgcaattgaattccagatgattggcgttttgaaattagtccaaacggttggacttctgatgaaattggacttcgctggcttcagaaactgtttataccatcgactttatcgcgtatggtaggaaggtatcgacttttggtactcgatggtcacggaagccaattaacccctcaattcgaccaaatttgcgaggaaaacaatattataccaatttgtatgccaccgcattcctctcaccttttacaaccacttgatatcggctgttttgcagtctcaaaacggacatacggtcggttggttgaaacgaaaatgcggaatgggatcaaccatattaataaactcgactttctcgaagcataccccactgtacgaattgaagcttttaaatcagagacaattaaaaacagcttctcagcagctggtttagtacccttttcacctgatcgggtccttttaaaactggatgtttatcttcgaacaccaaccaccccccctagcaggggtagcaattcaagccagaattttacaccaaaaacccctgctactgggaaagatctacgtcgataggcttcgtcaatcaatgctttacttcgtacacaatctcgaagcctaataagtccttccaaacgtgcattaaaccaacttatcaaaggctgccagcttgcgatgtatagcgctattttactagcgaaagaaaacaaggagttacgggatgaaaatgagaagaagaagcaaaaacggacccgatctagaaggcagatacccgctgaagaaggcctctcagttcaagaagcttctcaattgattactgaggtggtggaagcatcagaagcacctctatacctcccgcgcggaagccctcaattagggttagaaccacgtccacgggctgcagcaaggtgtagtgggtgtggaagaaccgggcataaaattaacaggtgtccagaaagatagttgaatttagtttaattaatttaatggcgttatggttgagataaatgtatttaaaataggtagaagaagattatgagagagatgactaagtagaaaaatccaacctccatcattgtcgtcaatcaacacttttccagaaattgaagtctaaaactttgtgcctactcctacatcttataattctcgagaatatatatttgaaaactactctctatattaattgtatatcgagggcagagtacaatattatttcaacggtcgacgactaccacttctttaatatcagtctgtagtccaggtctctcgatttggcccttagccttgcagtaagatcttggagatgacagaccagccacatctggcatagcttaggcccaggcaccgacaatagacatgcagaaagctcctaagcagaccaaaagaaatgcataaactcgtcttctcccacgaaggatgcgccagctctcgtcactaagaaagtcttccgacatcagctctacgagagaggcgaagatcaaaagtccagcggaaatggcattcataatgccaacaacgagcaagccgacttccgagtccgggctatagagtgtgtgggttgcaagcccgatcgcttgtccaataggcgttctatatatccgtcagttcttcaatttttgaatgaccatatgtgaattaaagaaacatacgtgcagccataggcaagtgacataaaccagggctgtaattgcttttcagaccaggaaagcgaagcaattcgggatcccaatgcgagaccttcgaaggtttctattgactattacttatttcattcacaaagaggtagaaagatcaaataactcacgatggaatacaattgcgatcaatagaatcacaaattcactcccaattgacacactgagcgacatgccaataaagatactatgaaagagaatacccatttcaagaaggtaaacctgcatggtctctttcctttggttctgctccggtgtaagaatatgatgatcattatctcgctctatatccgaccggaatactccattttctttctcgtgatgagtttgagtctcaggagtagataagactctaacaactgtttcactttcatcgctcatgtggtgaataactcggcttatacttgaggatcttccgaccagaggacccatatcacgtacatggggttgataatctagtgtaacggaatgtgagctttgcgctcgaggttcagccgaggtataatcatcaagttgtgctagcgtatctctctcgggaccggaagaggatcgcttctgtgataagtcataatttcctccacggcaaatactctgagctggactaaataccatctcaatgaccgtgataaagaaaacacctgctagtgcaatagcacctggcatggctgggtagtcatttgtccagaagctggaaagacatgggtcacctaacgattgaaacgcagttggaagcagatgtacgaatgcagtggcgatcaaaacgccagttccaaaatgactgacgaaaaatagaaatgaaggcggaatgtgcagtcgagggaaccgagttgcgagaattgggaatgcacatgcaatagtcgatgttccgaggataatgaacagcgctgcgacatgtagtggaagatcgtatgcagcttcgcggacaccacctacggcacaacttgatcgtttggctggctgtgagtcttgctgttcaacaaggaaagttgtttcgagagctagaggtgcctttgggataaaacaattgcctaagctgttgtgggaaatcaaggcagaaataaaaaggaccgagagcagccaaagcgcccagtctttgactttttgatacgacaagggggtcttgttgagatctagttctccgtgacgaatgctaagatttttttggggagcgaggggtcctatttatttgatcagcgatacaagcatcaggggctgagtatgacatccataccaatggacgcctcgcctaccccatggagacgtttccccagatctgatattctgggccagtgagcatgagcccagtttgaatggttctgcagtaacgctagtccatttttatcgcccttgttctcacgggtgttggaaatgccaagaagatcttgacgggtcgtcaaatcaggagcgaaacgcggcgggttctgattccactcatcatggaggagagtatcatcggtccgggaggggcaattcatgatgcaaaggtgctcagtgtatcagcttatctagaggttcagagaaaaggaacaggggagcatctatgcgcttaaataagaaaataatccattaggcaccatcgattcgaatgcttggcattcggtggactccggcccgatttcttggcagcgaggaccttttcgccgagaaactgcgcgatcatgaacaccgcttaggcggcgagagttgaacacggcacatcaaaagtgcgagtagcaagagcagtagggctctttgttgtctcttaaaagcctagcttgctaataattcataccctgttgctctgctgaatctagaggatcgggggcgaattagtgattagtgacataactagtgttgttaaattaattaagtgctaatttatggacggatggggtcacttcaacataagtgacttttgccaagccactccatttattaactcatttactaattccagcccagcagaatccgcttagaagttgacttcctttttttcaacctaacccgtaaatgctgtttcccgctcatcccaactaataatttgagtgtatcatcgttttagatgaggttcaaaagcagactttgctaattagttacaagttgtatcagctatgtattagctatgcctaattggggttaatacagaagggcttacaatcataagataataccagttagtaagtggccagtaccttgctccaaatagtggagccctggaatgttcccgcctgcctaaatcggcggttaatatatgcgttaaataaattgacgcaagatgctagatcaaccctattataccctaatacctccgtaactactccgtagacctcggcatttccctatggattctcaaaattatcctcccagttccgatagagcaatttccataggagtaggcggtttctcctagctcgtccgtatgttgtgggattcccatagaatctcataggaatgccacccactttctacctaaatctacataattctgatttcggatgcataggtagaatggtttgatatttaagccacgggcttaatgatatttgcattatttacagtccttttggacttccatgggaatttggtgtgtgccgtccacctacagctatgggaatattccatggatggataccatggaaaatgccgtctatccacaatcgaaggaggccctgcagatcaagttcgctaattccgatcaccgggtgtttcacacgcattccatattccggaaaagtcttgacagtcctgatatgtcggtatttgagtataatctctgcctcatttcagtcttgaacgattttcctaggaagatccgtctcgccttgtattttctgaagtccattcaatactgaatatcctcgacacatatttggtttcactcacgcctccttctttacacgagagctcgtcacccagcaggccaacgacgttcgacctcgtgggatccttatggaacatcggttcaccgcgacgggctcaagtcattggagttccgtgggaaacacagatcggatcattccccacagttcatttcgtcggccaggaaaccgagtgcaacacagatcttgtccactgataattgccctgatacttacattaatcgcaaccgcatttttcctgcccagacttttctggaatggcttgccttcgaatctgtttcttccagcggacactccgcccactataaagtaaggtcaacgttcaaagtcatgcgcagccaattaacccaaataacttcaatatagaattatcagtgataagcacgacaaggtgttcgctacgggctgcctatccgttacttatgagattcagagatctgctcgtatgaacgctgctttcgttgtcctcgtgagaaaccaggaattagatggaatattacaatctatcaggtctattgagagacatttcaaccagtggtttcactacccatatgtctttctgaacgacgccgacttcgacgaggaattcaaagcaaagatcaagagacatgtcagcgctcctgtggagtttggtaaagtcgaaagcactctctgggactttccagattgggtcgatcccgagattgccagggagggcattcaaaaacaaggtgatgctgacataatgtatggtggaatggaaagctaccatcatatgtgtagattttactccgggtttgtcttctcgaagtgcacattaataaaatgctgaactttcaacaggcaattttacaaacatccgctgctgttgaaatatgaatggtactggcgcttggagcccgagattaagtacttttgtgacatcacatagtgcggtttgatcttccttttctttttctgaatttaattaacaagcgcaaatagtgacccctttgtcaaaatggccgaggcaaataagacctacgggttcactatcgccatcaaagagctccaagagacagttccgaacctcttccgatatgcatcggcatacaaacgcacgaaaggtatcaagtccaagggtctctgggagatgtttttaaatcgaccgtcaggagtaaaattgccttcctcggaggacgagaaatggaataatcttcctgaggatatcactatgttggattccgatcatgttcattcggatgaaatctgcccggatgccatggagggagagtcctacaacttgtgtcacttttggagcaactttgaaatcgcacgcctggattggtatcagagcaaggaatatcaagaatttttcgaaatgatggagagaagcggtggattttggatggagcgagtcagtaaaacatccccccttccaaatggacgcatgcttatcattaaccgagtttgtagtggggtgacgcgcccattcactcactcgccgccggtattcttctttcacccgatgatgttcactacttccgtgatattgggtaccgtcacaccactattcaacactgccctgctaatgcgccagctcgacaattgcctcgcgctccttttcttgaccaaaccatagaagatgaaaaggagcgtttggaggaagacgaatactgggctaattttgactcggtccgggagaacggcgttggctgtcgctgcaggtgtgacactgatgtcgtcgatgccgaagataaagagggttcctgttttgccgaatgggtggatgttgcggggggatggacctctccatgaaacatgaaatacatagttattcacatgcatgctctcgcatacgatcttgacccttgcgtgtgcctaggaatagaatcaatcacagcaaattcaattagtcttcgaggtttcgatatcgaagacgtgctactccactacataagaatttggtttacgagtttcttcgacaacttccaagggatctattggttcgaccttctcgagtcaatcattcaagacgtccccgtccatatctacaacttccatgaaactggtctataaatcgaccaaggaaaacctccgaaaggtgttagtgacggccatagccgctcagcatatcttccatgcgagggtacacgcgaattaatcaccaaaatcgagcgtatcaccgcggacgggttcgttcttccgaaggacaaatctctctatcgcgacagtttcgagccttcggccacatcttcgggatccaaattcgaaaacaagctttcaaaccctcttttcgaggcgatggtatttatcctttcaattcttcaattgttcaaagaacaagctagaaaacccagagttacgagttttcggaaacgatacttcatacttctcggatgctacacatccacaactccaccaaacgggtcgtattcaaataaaatcgagaattcgatagagctatggggcggcggaaatgtatcccattggttccctacggtaatagtatggacgcgacacatgctgacgcggcctcgtatgccacgcattacgaagacccatagcgcgcagggtccaaaaaccccctttagggcctgactgcctgaattagcaccgcgctatacaatgtattgtaaattttaattacaagtccaaaaagataaagcctttgggcccgcacaaatgtcggcatcttcatatttctggagggtttacaagttcaaaatatgaagcttttcatcccagaaggcttcaatgctgagaaataagggaatcctaggatttgtgtcacatttcatgcccattttctaaggcattcctgttgtcgacctcgaagagctctgttatggtaattcaggttttcaatgtttctgccgttctaaaataaggcattcaaacatcaaaaccccttttagggattttgaaccctgagtgctatgggtcttcgcatgctatttccgaaatccggagcaatcaagggcgaaacgatcagtttctcgttcgtcttcggtcaaacccggcactaaatttgctggtacaacaacaagctagtttttctggtgatacttccctgtttgctataatctgtgacattacaaaggaaaccaagcatttctctcctctagcaattgattatcatggcatactttccagcaatcttcttgctgactctcttatctgccattatgcctgttttatgcagcgcgacatcgaatgtacccagagactgtcacccattgccaaaacatttcggctttcttccccatccggtcaggttcgaagtcttgcgcaaagaaaaacatgacgaaaaaatatgcttccagggatcgatcgaaaccaggaaaagccaatccatggagatgaatcaacctagcaggcctcaggagccgttttcatcaacgcgagccgaaaatgacgatacagagacagctgttactacttcacaggtaggagaacctctgtgggttctgaaagtggctgcaggagaccttgctaatcaatcggtagggttctaatggcaaactggcggagggtacggaactcaaattcccaacattcgcgaagaagagccttcccgctactgagcatggactcaatgatatgagctcgccatttccctctaaagaagatacatccgttccttccgttgacagttcactccactcaatcatttattcattcgccatgatcattgtctctgagattggtgacaagactttcattattgctgcactaatggcgatgagatgctcacctttgtttgtatacagtgctgctctctctgccttggttgcaatgactctgctttcggcccttctcggccgcagtgttccgacattgcttcccgatacatacacaaaaatgttggcggccgtactattcttcgctttcggcttgaagatgcttaaagagggctatgaaatggctccaaatgaaggcctcagcagtgagatttcggaagttgaaacggaattgaaggaaaaggaccatgagcgagtacgtgacggcgaccaagatacatatggtgaaattttcgatgtggaagctggtcatgatagacaagattgcccagcggatcagtcacctgcttcgctaggtagaaatttgtctgcaagccaccagtttcctggttctgttcggtgccattggcaatctctcatggcaggaatgagcaacctattctccctttttctcagccctctatttgtgcaaatattcgctatgacctttttcgcggagtggggtgaccgcagtcaactttccaccgtggtaatggcaactggtccagattattggctagtgattcttggagctgtttctgggcatgcgctctgtaccgggatcgctgtaattggtggtcgagccattgctggtcgagttagcatgcgagttggtaagtggctgccatgttgcgaaatcctggatcgaaactaacgtttacagtgacgttgggcggcgcggccctttttctgctatttggactcatatacctgtttgatatcatccgataaagcaaaatgctccacctggttgagcgtatatatgtccgtgtcgaccactgtttgaatatgtttcggacaagttacaagcatatggttgatgtaaacaggcttatcaagacctgaaagaggtgtgcttcctattgtaagattaggtcatgtggcctcctttttgctcctagctttacggagtagtcctagaacaactcagatcgagtattccgagatttacatatccctctattacttatttccatatacctacagttccaccgtaaagtttttcatactacccccatcaaacatatatctcatacttgcaatttcgaggcccaatatacactatagcggggcatggtggttccaaagcagtggtgggttttgtgggagctgagaaaaacaagctatggtaatatcaaatggtaaagtcaaatcagaatcgaatgatatcgccccgtctaccccataggtttcagctccatcttgcacggttagtttgaccaaattcatcagcatcgccaataaatccgcaaccaaaaaagaccctagaagtttattattagagttatttttcacgccatacttattatgttgtgattctctctccaacaaaacattgctttgcagagcctgagcgcatcgcagatcttcggacccatttagctgctgttactgccccaatcgcagtgtgtagtcgatgagacgatttttcgattttcaccatcttgtcgaatatcgtcggagaacctttcattctcgatatggataatagcacatagtcaagccgagagccgctcatatctgatttcaaagaagcttgcatcacggctgctgtatgatgcatcaatgccagcttgaaacacattgtagtaatttgtggcgatctttatcaggtacatacgtatctggtttggagaattccgttccgctctaagtctaccgagctcttcgtttttctctcagaaaagacgccggatatcatcacgaactttgggtagctcgcgctggatatgagtgtctaggatttcttccagaaaacatcgcagcttgtcgaccccaacgcgtgaaggatccagccctgcttcttccaaacctcggttgaaaaatacgctagtcatatcttgcgtcgctgttctgtggttattcctgtcttcagcttcgtcgggctggtttttttcaggatgaaaaatccaaaggtgagtttgatgaggtcacagttctaggcaaggcgagcgatacgtgcctccgtaccggcattgatgagatatgacttgggaataataccgaaagtgcagagaacatcctaaacgaaccgtctcgcacgctagatgatgccctgggtgtcaacatcattggtggccggtggctttagacatcatcctacgaactatgcaaatcccaatgcgctcgcttagctctttcacataacaagaaggaatattttctcctcggccaggaaggaaccaatgatccttcagatcgtaacactcgtggtccattccccggcatcttgctttaacctcctgacacatcgagtattcaatccattacctcgattaggccgtttcacacatccggccttagctgctgtattatacttatcatggtacttatcatggtaacttccaattgcgtccgtatcggtgaactcatctgcccagtaacacaaaagaactgctccaactctgcggacatagacagcaccgacagcagagaagagcctcaaggcagacgagcgtagtctttccatctctccgataaacattggatgggaacaagatggccgttcctaacatcagctcttcacagtaaatggccatattcgtcatagttcgcatgcaccgaactttacagggaaagaactacgtcgtcagacttcatcaatcaaagctttacttcgtacaagatctcgaagcccgcctagcccatcagatcgtgcattaaaccagcttgtaaaaggcttccgtcttacaatgcaaggtgctatcttactcgctaaagaaaataaggatttacgcgccgccaacgagaagtagaagcaaaagcgcactagatcccggaggcagatacctgccgaagaaggcctctcggttcaagaagcatctgcattaattactgagacggtggaagcaattgaagcacctatccccccccccccccgccaccggacagccccgcccannnnnnnnnnnnnnnnnnnnnnnnnnnnnnnnnnnnnnnnnnnnnnnnnnnnnnnnnnnnnnnnnnnnnnnnnnnnnnnnnnnnnnnnnnnnnnnnnnggaacaattggaaccccctcccccccccccccccggcgaagaaggccttcaccacctttacagccccgaacgagagcattaccaacatgcgggttatgcaaaaaccaagggtcataaaaaaattgcatgtccagagaatagatcattttagtatatttaatttaatggagttttggttgatttgtatgcatttgaaattagtaggtttggttggggtggccactcgcttacaatggccactcgcttgccgaatacgttcacgtatttcacaagcgagtgacgcagtcagaaacacgtagtaaatagcataaactacaaccttatatatcaacaacaacgtccttgtttgatttcatatctattcgatagctgttgataagaatttaaaatgatatataacgtaattcacaagcgagtggccaccacaagcgagtggccaccccacctaaaaacgcgtccatgaattaggacttagttagttcaaccacccaccatgccaccaatacgctctcaatcctctacaaagtcagtagagcaagagggtaggatcttattagctatccaggctttaaagaatcaagaatttaccagtatttctctcgccgctcgtactttcaatgtaccgcgttcaacacttcggcaccgcctcaatggtatacaataccgcgcgacttctcgcgtcaactctactaaattgaccgcaattgaagaggaatctcttcgaaaatggatagtctctatggattctcgtggatcagccccccggccctctatggtacgagaaatggcagatcttcttctcaaataacgggaactaccccgattattttagttggcgaaaattgggttacaaattttgtcaaccggtaccctaccctctcatcccgattctcgagacgttacaattacgagcgtgcgaaatgtgaagacccaaaaatcattggagaatggtttaatcttgttcaaaaaactatcatttaatttggaattgacccggacgatatctataacttcgatgagaccggatttgcaatgggattaaccgcaacggcaagggttattactagatgtgaatactacggtcggagatcacttttacaacccggaaatcgcgagtaggtgactgcaattgaatgtataaatgcggtagggtgggccctccctctgtgtattatttttaaaggcaaggtctttattgaatcttggttcaatagccttcctaatgattggcggtttgaagttagcctaaatggttggacgtctgatgaaattaaacttcgctggctttagaaactctttattccttccactttatcgcgtatgaagggaaggtatcgacttttggtacttgacagctatggaagccatttaatcccttaattcgaccaaatttgtgaggaaaacgatattataccaatttgtatgctaccgcattcctctcaccttttacaaccacttgatatcggctgttttgcggtcctaaaacgatcgtgcagtcggttggttgaaacgaaaatgcggcaaaggattaaccacattgataaacttgactttctcgaagcatacccttccgcacgaattgaagcttttaaattacagacaattaaaaatagcttctcggcagctggtttagtacccttgttacccgatcgggtactttcaaagctgaatatttatcttcgaacgccaaccccccccccctccccctagccggggtagcgatttaagccggaattttaccccaaaaaccctattcaatggcaaagatctacgtcgacaggcttcttcaatcaaaggtttacttcgtacccaatctcgaagcccaacaagcccttctaaacgtgcattaaaccaacttatcaagggctgccagcttgcaatgcaatctgccgtacttcttgagaaagaagtaagcgatttacgcgctgaaaatgagaagaagaagcaaaagcggacccgatctaaacggcagatacccgccgcagagggtctttcggtccaagaagcttctgaaatgattgctgggttggtggaagcatcagaaatacccctagaccccccgagcggaagcactcaatcaaggttagaaccacgtccacgggctgcaccaaggtgtagtgggtgtggaaagacagggcataagatcaataggtgtccagataaatgattctttttagtttaatgaatttaatggcgttatggttgaaataaatgcatttaaaaactagattgttgattggggtggccactcgcttgtggtggccactcgcttgtgaattacgttatcaattcttaggcattcaatgggctgtaatatcatagtatcgaaaagtacatcgctctaagctagaaatatgtatatccttatcactgattagtaaaaaattctctaaactttatagtgagactagatgctacctaaaaaccattagcctgtatggaaacaccccaatagaccaccgttgttggggtatcaagttgtaatttatcccatttactatgtgtttctgactgcgtcactcgcttgtgaagtagttagttaggcctcctgtctttcctgcctgaaggataaagccacaaatgtaggggttccgagttttccccactgcgatatgtagtcgtccaatcggttgtgattgttccgatgctcatgcatctcgactcgaaaatcttcttcacttggaagtttcctttatctctttagcatcaatctcttcgccattataccactttttatgcctcagtactgttatcttttttatattcgtggtaccatcgtagccgacaatgaattcgagagaataggggctgatgtctataactcgactagcaaataggtccgagaaccctaataactgcttctttggctatgtactcttcagttgtctatggccatgcatttaaaggactactggcccattgcggagccaagatgacgcggtctgggtaaggtgatttccgcttttcgctagcgtcgaagaacatcgtcggagcagtgaagatcaatattagtatcatgcctattgagtgatatactattgtgcttatagaagctataatgagtctattgtcttaggaaaggcggtctaacccgtaaggtctcatccatcgtacaaatataccagtttattaatcaaggggtgatcggccatatacctttcaagggttgtttttgaaaacatctttgctgttctaactcctaggaaaggcctcctaagattcggtcccccctcgggtcttttgtcttgaatgttaaatagaatcataaccctcaaggtgaagtaatagcgggaagctaccaattctgctgtgcttcatggtcggcccggcgtgtatctcgctactcttgatctcggtatcacagctgactcaaagtgaggaaattgtccgcgatgaggaaactgcccgagatcactggtaaaggcccgatggagacaatgaagactttaaagagaaatattccactggagattcactgtggattcaatgggtgggctgggattcttactacacgaatgtttatatgcttaacgagacgaaagccaacctgtacgtgaatatatggcacctagactacgacgcgttttataagattcttacatgtacgtgatctccagccatagacttttgaacaataagctaaaaatcttgtaaatagcttcgattgatatctcgacttatggatcttatgattggaaggttgacattgatgacaaatacttgatgcagactaacgagtacgcttttagttttgtgcctgacggaaagcgctttaccacctatggcgctaaaatatctttaccgggaatccgtatccagtctaagtcgattacgtccttatccacgttgctagctattctaacaatgccctcgaaagcggtatcctctggtatgtatagacttttaactggcgcgaaagtagggatcggtattggtgtgggcatagggggcttggcgttattatttataataggatttctcctattgtggtagcgacgaccatcctcacaagaggtgaccagggtgatagaggcttctaagccaggctcggtctaaatactggatgacggcttctgctagaagactagactgctgccataagagctacctataggatctgtgttgccggctgagttagtatcgacgtataggggatgacatgagggcatgctcctaggctttggaaataccttttacttattcagccagcttattgaaaattttgagatattcgaggtaactcgatttgcgaaaatgctatttcttcaccatttctatccccgatttgtctgacatatattgttttatttctctgattactactgtattgattgaagatcatgattgaagatcatgatgaagctggctttcacatttatatttttgcttgtcgagaggactaatattacctataggaaatcgcttaactaatacttgtacctgaaagtcctttatctatggactggtgcatttgaagtttagtaggttcttaaataccggctcttggttgaaaagcagttaatttggtcgtttaattttaaatagtcatgctatcaaaatataattcaaatagtgataagagtaggaagcgtctcagtcatatagccgctcctcttctgtagcagtacacttccggcacttttcttctggctgtgttggtgggaagtcaaaatcggacacagtgtctgtttcaatctcctctttcgcgatgatctcttgatacctgctctgtagcaactgcgtggcgagatgtatagtggcccactcccggggcaaaatggtgtcggagatcaagatgtggtcggatagcgtttgtaggtattgaattgtatcgttgaccatttgcctactaacttttgtaagacttgggagtctttttcggtataccagtcgcgagctatccggtatttgagggggggagtgtgaatgtcggtgtcgcttttgtgggagagatgaggccgcggctgctctcttttttgtgtttaaagggggcagtttgtggatttcagcctttgtagcgcttcgaggtaatatatagtccctcgggctagtaacagaagtagctacctctgtagctacagacctagtggactggttaatacatggttgtaaaacctggcttgtatggccgcgattttcgtcgatgaactggctaaaaacctggtagaagcctgtatccgatttattgcctttataaatagatttgttagccgatggatttctctagaaggggatctagaataacgttactagcttgctgtgtacgtctattgtgatcttctgtgtctggtgaaccggacctcgctgatacttgtgaccgcttgtggtctatgattggttggctttgatagtgatagtgttgcactggcaaattattggttggagaaaagggagggcacgagagcatctatggtgaggataaccatggccttttaaatgtttggagctcaagcagttaccatcaaggatatatccacagtcaagatttcgcggcttaccgttattaggccagctcctaggactcctagagggactatggacgtcagtatgtggtcctaatagctacgtatgctaacagtcaaatcaagcatgatttaatctagttgccgtatctacatggtgctcggcccacctactgatttaaagcatattcctaggagcaacctggcttacaacttatagatgcttataagtgggaacttgtgaatgggagggcacttctgacaggcccttgactcagctacgccgtgtagccacgataacgatcccactagctgaatctgtttgatgcttctaggagctctgaactctttaggttctttaatcataattcgttcgttaactttatagtattggtgtttggtggtactggcgatatacgtggtgaatggtgttagaaggttgaattaacgttgatatctatattaaatataaaattccaccgaacaccagctgtatatgagttttccacctatagaagatacctatcggagccatgttagttcccttctaatagcggacttggttaaattcccacttaaagctcgtttctttatcagccccgctataaactgaatagtgacggttatcccgtggcctagagacgcattgtaaactggttggtaaagataaagttaaaaaaagagatagaaaatatgtgattttatctcgtgggaaccgttggctaattttcaattagcggcaaaatgcggtcccttcgagtacagcaaaacgggtatcgcgaacagagtatatataacgtttatgggccccggagatattgaccggcttcatctttttgcctcccactctttactaactgcctgatttaaattaaatcatgcttatcgcttggtctgactagccagcctaccgtggccgatattggagtaatatgtctgttaaccttagtcttcgtaatcggctacagctaggtttggaattggcttctacattttatacagaacctctgctaaaccctaacgctaagccgatggtaaaactacctagtcttaatctggctagtctgcagatcatttatatgcgtcacaatggaaatgtaacttatctgataagactaattaatataccgaagcgttgaattatacgttattcgagactgtcctaacttactaccttggtccccttctccactaccaagagacgaatatgcacgacaaaaagtagctcgaaaactgccctcctctatccgagaatctattcgcgatacgatcttgagcaaatcactgattatggcctagatagctagtggtgtagaatgcagcttgagcgtgacgtacggtggatctgagaagcttacttcgtgggactggaaatagtaaaatttgttgagagaaccttgatctactcttcgctaaaactctataccctatgggtttgttagggacataccttatctatcgcgataagagatttatattaaatataaagtgctctaaaaaatcgcgcgttgatttatttctagaggtggagtaatgttatagatatcagttgaattctccgtttggtattaccatcatatgtgttgaacaacccttgtaagctgtgataggaaattaacgcactgagcaatcgtgtatactccgtgttatctttgcctatagcttgcttttcttatgacttggaaaaagacagtagtcttcctttatatgctggtttaaaagtgtaatcctgcaaccgtgtttgatgtccctacccttacaggtgggaccattccacctaccaagcatatctgtccacgattttttgtagttaggatcctatttcacgatatcggaagaccgaagttcttttatcgccggattattgtagtaacagtattccgagtagactccttgctttgtgttcgtaaaaactttttctaaaggtagctctaccgtttcatgacattgaataatatcataaatattcagcgttatgctagacgggaagtgtaccttatatcgagtttgattatatttccagccatgctgaagagcggtaaagaacctttcatttttgtatctgagatcgcctgaataatcacctgtgataagagtaaagtagagacggtttgacgatttcctagggcgataggcgctcaagttatggccaatgagaactggagaatatctgttaaatgtcaaggcaaattccagctaactagtgtctttgaatatctgtttctagaggatagaaccggtatttatgatattttttatatctgctggtgttaaaaagtccttgatacttaactaaatattaagtggggtttcaaagagctttattgtaaatgactgacactggtgccggtgttgacctagcttataccagggaaagtatttatacttcactgggctatttctgaaattagttaaccttacaaaatattaagtaagagtcccgcattcttgtcactccctccggaatgcacctatgcctgtgattatagagctggttaagaatagaatctatgctctatatttctctgaaagttgtggcctaatgccctgcctatctgacccttgcttatttttaccctagcttaagtagataatttctatgggcaaaaaaacatgctgttggtgtttagtggctttcatgtttaacgttgatgtgaacgttgatattaactttctgacactgttcactacccgtatattgccaaaggtggttataggaaatagtagtaggtatcatttccactagccctttgccgaagcgatatgcagtatacaataactatatatctgagtatagtcgttctcgaaattggcttgatagatataatcttcgtcactctgttctgcccctactgtaaggccttagtgtatattaataatttaggggggggggggggggggtttaatttttggagtggnnnnnnnnnnnnnnnnnnnnnnnnnnnnnnnnnnnnnnnnnnnnnnnnnnnnnnnnnnnnnnnnnnnnnnnnnnnnnnnnnnnnnnnnnnnnnnnnnnnnnnnnnnnnnnnnnnnnnnnnnnnnnnnnnnnnnnnnnnnnnnnnnnnnnnnnnnnnnnnnnnnnnnnnnnnnnnnnnnnnnnnnnnnnnnnnnnnnnnnnnnnnnnnnnnnnnnnnnnnnnnnnnnnntgtggtgtgttggggtggggggggggggggggggggggcattaaattgatagatgtcgaaaaaggcgccgagtatgaaactgtattatagtatgtagattaggtatatttgttcagtcgctgtagttaggtgtaatactactcgcaattttatctgccggcacccagttttgagctaagaatgaagcgagactgccaatacctttgggggatacctatacaaagatgaaacggtctgatggtacactttaaagatcaaaatttcatttgcttagctgctaagcttgctccagaactctaagccacggcgtctctgttgctgatatagatcttatactgaaagcttggagtttagatctgatctaacttgtatcttacttgagagtaatcaaaaaaaatgactatctgcgtttggctttattggtttctaattaacttggcttattgttgtatatatagccttatatttccctcttggcgtccagaaaagaatttgtctataaattccctcggctagttatgatgagtaaaatcgagttggcaattgattgaagcgttctaatttgggaagctcggggacttgaaggccatataagccacgcttgttcgataggtgtatcacaggaagggtgtccaaaatccttatttatgctttctttgataatctaagattctatccttgggtatttacattaagtaatgtcatagctccctgcttatgatgtattaagctctccatttagtttcccagttgtgtccaaaattgctcgaccacagaacctgtatcttatcgcggatgtcctcggtgatatcctcccattctccgttcatattttctagtatgtcagcatctataatgtcgaacttatggctagcccagtctcccttggctagatatcctccccccgtaatgccggttgaactgtcagacgaccaatatatacgcatcagagctatgtggctagcggtaattccacagggcaatctggcctctaagatatattgattagtagttaagttccttaggattcgatctttgggatcgacagattcttctatggccgggagagtcgctccttcctctgtgtaagaccaaaatttaaaattctcctcagcaatattgtagcggagaggcttgggtgttactttactctcggcggaaatcaggtggaggctgtcttgctgaatcgtgatagggagattgtctggttttaagtaatccccgatatagatgagccgcgtgctagcctactcgtattcaatcaagtcacatagaatgttggcctacgaggaaaaaagcaactctgataactttctaccaaaaagccgtgttgtgtactcgcgtttggacggataaaccactagctagtattgacctattgtttgtttgtttgaaagaaaggataggaagattgtgggagtgggggccgtagggcaaagttgaatgcttgagagatgctaatactggatgtaacgggaagacggtacagttgtgaattggatgagcttctaatatggcctgtctggcaagatgcttgactcttatatactggtcttgtgggagaatatatgggggaagattaaggatagaaacgtctgtaagggtaggacgggaagtatggtggatgtagcgaccaatctaatcccggaatacctgatgcaagttttgaaaaggtagttgaccctgggagctgatagggtgaatttagtagctggtttacttaagacatcagacatatttggcggggccgtcgactaactatcagctctgcgtagatatctattaaacttggtatttgtaaagagtttacaacggtgactgtagaaatatcatagtcccagtaaatcatacgtagcttgtaaaactggccataatcactatcaaggattgatcatgttcctgcctgtggttctatctgtgctaggaatacacatcttggtcctgggcgttctctcgctcccggaggcattgaaaagggttctgggagcacagttatagatttcgaggggctagataagctcgagggaacctgaagtagcttgggggtcttatatatccacttaaggaactaaggtcatgttttatcaagtgctagaattataattgcagctcctggcgttacggctaagccctgggagtgattaaataacgcagatttgtgcgtagatctggtgaggatgtcttgtgagggctttctacgaccttagaaggtaagatattgattctaggaccctatcttaagctcctaggctctaattagctgatatcgatatttccatttcttcggtcgccgccgctaggtatgatactactagtacttttatctaccgatacttggtttcgtgctaagatatatgtggaattaaagcgaacctgcttacaccgtttgtgggtacattgacatctagtatatataaaggtgaaattatcgcgtgctgtcggtactccggagtttaataatcaaatttttaaaccagcctggtaaatcacgtgacctatatgtattaaggatgacggtattcatcctagattctgatagttgcaaaggctgcgctaaacccctaaatcacggctatgctctctgttgctggccctaatgccgagcgcttggttaaatggaatcaagtgattgatagtcgcttcgctaatttttcattttcgttacacctccgctgcaaaatataaatcatgtatgctgagtggaagctagtcgagccgaccggcgaagcggtgtagaggtagaaaggttgggcggtagatgagcgcctgctagtccggctgagcgacgggctgtttacctcactccgctcgactgatctcccttagggccccactgaccgctgacgcggctgactctgatgagggtcattgggtgatgaattcctgataacggtaagttctctgttgggagataattgacgggtgcactgacggctcttgtctgtgttcgtgaggtgactggtcagtgctgtctgatgtagggcgtcccctagaggctgacgatgtctgacgctggctagggtcactgtgaggaatcacgcagatagtaaataggttccgaggtagtatagaagatattgagctgatagtaaaggtagaaaatgattcgaatgggtattgatgtcgcgcgatctctgtaaagttccctcgctagctttatatagcattattatgggatctatactaatatcacgcatcgctagtaacgtggaaattctcccttgaaacagttgatacgtcgaagaatgtactttgatatgactagagctcctagggaataatcaccactttctaggaataagatgagtcgggaaactagctaagttaaacctcttctacgcggcatgtactggcgaaagagcaagatgaaaagtccactgggtactttctgaagattatatatatggtgtcttccctctatggtaatatgcaccagctcacaatctgtatcttctccggtagattatatctaaacctcgcgattgacccgagacgcttttaacttcactttttcatcatgtctaggaatcctgctcatctacaatgggtattgggctaagtcttaggcgatcccttgcaccgtgagcggtgtatatgggtaggagatgataggaatcactgttgaaataccgtgccgcttgactcctggattaatggagtactgtgctttcagctgctctagagctctctgtccgcgtatccactagcgcacgagtttgccttggctgcaaagcagttactttgctttgagtgcagacgctatcgctgtcggctaaaagggtgggccagccaaatattggatatgttggatatgcgccgagactaagccgaagatgctatgatttactcggaatcttataattcggctagagtggtatatcaatggctaactagcattccctataatattgtcacagccgtgccccctaatgaggctttctcgaaaaccgaaagggaccttgtaaagaaataaaactagcgataaactcctccttggaatatttgggttggcctagggccgtgaaaatcgaggatccggaccttctccagaccacaagcggctttagttgtgttttgtgctatatgtcttcagtacaaaccgtggaatttatgaataacgaaagtcggttactcgtctacgcagtatgatcccttaagttcccttatgcacgagtttcgcacttaagtgccatctgaaagccctgtgttcttacacaaccgacccccaggctgttgctccccttctaggttgtggaactgaaaaagagtatggttccaggctgctttgtggatgttcgcggtagtggatctaaaccgatcaaggtctttttgtctcgtttttatgatctgttatctttattgggggcacctctggggatggggcggcggaccgtcgtgtatgttccaatttagaagcggcggtaggtgtatgtatctttgggagagattttgatcgtctgatactgagaagaaaagtatctttgaatttatggagctttcgcttaagcctctgaaatctcgaagagaaaattttccctatattactgtcaacgtgcttatagtgtaggaaaggaggatggcagttttgaggcggttgttgggatctaggaaataacgataatatccggaggcttatataacacaaaatcatattatagcactcatcaaatgcttttggtgcagtcactaagaaagattggtagcctagaagagctagtgaaatttacttctggtaggtccatatcataatacgagattgggttaccaacgttaattggtatcaatattatgcttaaccacaatatacctacatctctttgttttaaatgtattgcggttaaattaatgggttatggttcagcgagctctacttgatacctagtatgtatatatccaatgtatcagaggtctacttgtaaactgcctttctttaggaaataggtttggcaacgatcttttttaacgcttaagggttttattttcgtatatcggtgaagaatccggtgagcagctggcgagatccagtataaccagttgagctaactatttactggcttttcgaaagtgcggtcgatcctaggtggagaagcgttggtagagataacggtagcctcggcgtgacttgttagctataaagacccctaagtacaattcctgatccaatccatcttgatgaccaaaatggaccatcctacttcgccttccctaattgatcggccagctaaacgatagtgccgagtatcttaagctccagaagatggacccatgttggaaacccatctatagcaagccttaaacggtataaccatcgaacccaatgtctgttatacccctcccggcaggtaatgaaaatacctactaatactaaatagaatctagtgagaacacgtgataccctgacggcagagttcatgaaagtattaaaccttaatgcctcccgcgctataccggtccttaaattgcttgacttgtacttttgcctatgggaatgctatgtcgtcaaatcggcgtagaaaatacgactcgaggaggagcagcgatagctttaagcgttaaatgacttgctagtaagcgatagcgatatccttctatagctctgtaatgaacaggtattagtaatatgggaccgcaaatgagcggtgcaggctctttgtaacggtgttgtttcagccttggaagcgagcgatctttaagcctactctgttggtgagcctgagccttgattaagtccctagatggtagagcgtctatgggtaggaataacgacatttgatcttctaatagctatttgcgctatctccttaggatcaacgctagcgttagctaaggcctatactgctggtgcgcattcgttgggtttggtgacgggtgccaacggtgcacggctgttgatatatctaacgtgttcgataacttcatatatggctatgtactcccttagtttgtcctgatgttatgtaataagaggggaataaaatcactgcttagcctctagcttgcgattcctctaaacccacgtgaaattgctgcttatataccactgtattttttctgacgcattgagacagcgagctttcgacgaatatgaattcttgagcaaaatttgtctgtacccgttgtcttaatggccattttgtgctgatattagtagactacgatttggatcttaacctttacgctatctggtatgaatcctctagtatgccgacgacgcctccctgtcttgcgattaatcctattgatctgccgcaggttcttatagtaataataatgaatgataattttgaaccttgttaccttcggcgcccgtggctaataatatgaatggtcatatgtttaccccgctttggttgtaggtttgcttatttctgtcttcgcttttgggtatgataataagatcagttatttatactgaatgttaaagcctaaattgctttttttatgtgcttggccagtgtaaaccttagaagcttgaattcttcactttgatacccgggtctccttgtaatctcttcgagctctgtatataatgtccacgccttaaaacatcgagggtatagtatgctttttggagtttatctacgatcgttcaccgggccttgaagaatcaatataagagagagaagccagagagatcgataaagagtcacaattatattctaacgaagaggaactcgatagcgtctacggacctataggatactgcttggtgaagaggtagctcagcatgctatgataattgagaaccaaaaaataccttggacgttagattgtttgaaaaaaatcatttctatcatgggcctgttgaagcgacgtgctcaatcctatggcgagtggcctgagtcatcctgtagatcagggctgctaccactagaaagaagcagatgtatgaaccctattctgcctgcgaaggctgcgaagtggagcgctgtctagccgtggtcatgcttaaggtctattctaacgttggatcgttctaggatgccgttgaggaatagaaattatagtgacagtttggagtggtaaccgtttttgttacgctaacttaagtatatacctgagtatagagtagcgagtgattgtttaagatattgcaatggatacagagaaagagtgctcactacttgccgctggactgtatatcttatccctttggtactggtgtcctttctacttggctagcggtaagagtaccctccgatactccgcaaaagttttataggtgtaaacaactctcctggttggaggtcacgtatgttgcaagcggcctagtaggaacttagatattgttgaataacaagttgatctgcactagtgctaattcaaatatataagttaatggctgaagaataataagtgagtttaacgtagatgtagatagttgtggagtcgtcttaccgaccgatagtgaaagtctgttggtcctggtgagtactagggctttatcactgtttcttaggttctgttatgagttgcttgagaaacgaaatgaactctgtactgtatcgcagaagacttatcagtctctggcatattatttaaatatccttcagctacccttgtgcagctagtttagaccctcttcctacgccctataatctaccctgacaagcaatccggctagatggagaaatatggttagaatggttcgtaccacttgatttgatttaccgcctgtgcttatagcagactagattgcgatttcgatctcgaccttcacgcaatctggcacgagtctccctgtatatcgattccagcttaaatccttaccgcatttcatgacattgggctagattttcctaatctagcgaaacctgtggtatatgagccttaagaactgcttttggtcgaatgcttcttcctacctaatcatgagagccagtcgggctttaattggacgggtctggatcctctgtctttctttactctagctgacgatatcttcctttatatattaatgttgcttctctccgatgaggtatactgggtggagttccgacttgcacgattcgattaggtaaccggcgagagagtaggcgagtatatgtttttcctacttagggttgaaacgcttatggggaacttacgccgagtacgtgggcatatattagatattacctcctaagctgctgttggagcgatgatatcttatttccgattgttattgatacctcgttcggaagcactgctatattcgagccactcgatactttctccgttagctatgctacccccgatgctatccctggatccgttattttctgtatataatctctaggaaaattacagtgaatgagcctaggtcgtttaaacatggttgagaagtttgtatgtttgcctaaataacatctccgatgctcaccgccgcctgcagatagttgtaagagattcgcacgattttattgtaaggtatccggttagaaggttgatactacgaatggatagcgctacattgatttttataaatacttgtctcgattcatatagagctgttaggtactgatatgttaggctgttcttctggcaaattctctcttgtgtccttctatatccattaaaacggctagattaccgttcgaacattgattccagtcccagaaaacgcccatcacagacgacgagccgattttaagcacaatttatcttaaactagcgctagtccatcttataggctactcttttatacatatatcaccgcagagccttacagtggtaggacgaatgtttcgacataatcggaaatgtgattggtgttaatggctgtttgggctttacaagctgctggacatccctatctctattttaataataattaccatattagaccaagcttctatatagccagacttggtatacaagagttggaagaagggttattaacggttgtgataccttatttaagactgtgggaggccaaaacgcccatattgaactcaaccttacaagtgtctatttaatcaacaggctttccgtctatcaacgtcttatcattacaaacaaatctatataggcgcagcctaacgtagaaaatagcaatttatattattcaacgctattcataggaaggggaacattaactcagcgactcttttcactccataggatgaaagtgtgacaatgtgggaatccaaggatctcaatctttgctaccactgagccgattctattaactttacctagctagtcaatactccgtggatacctctagccggcatcctatgcttacatcccagagtctacatcccttatattcgaataatatatcgatcgtgctataaagtattataccgtttgctactttcttcttattccacaaccaatatttgcaaacatgctatttacaggtgggggaccacagataaaacgacaaatcacaaaaatatactcgtaaataggggatttagcgtttccaaacgacatacaaattccctgtaataaaattgtaatcgaagcccctggctctgtcgagtggcctggtataggattcgaccaaatgtaacggcctagttatcttttaggcctcggattacccggtgcaaaaacactaaggcggttgtgatggtcacttttaagagtaaacgggtctctcgattgatctagattacagctattgcctatcgcgacctgtgatctattagttcggatatctacctgccccagcgcctcacatcctgctagggtcacctttacctcctggggactttaactaaacacctacagccgcttgaggtaccaaagcacgatacccagaatacaccttatgctagtctaaaatattgcctttactagaatgagtgctacctagcggcatagatactatgaaaatactaccaaatccagaataataactattttttcggcggagaacaaatagaaagtttagacctcgttacaagccaacagtaggaaccgagcccggtttccaggacaaccatatgaactattctagctattaaagcctatagttaggttcctcgtcgatcgccacccaccttacgagattgcaacgctactatcgcactctaataataccttaggcccaacaagcagtcggactaatcaaataacacgcgggaatgtgaatgctagtctaattccgaggtggaaaatcctagcggccacccacggaacagtagattaatgaggtcttatttgtgctctataggaagaattggaaagatttacaaatttccagacgcgatctataagcctagacttgatggcctgcgaataaaatggatcttgatttttttgagaggcgctattgggccagggcaggtatttggaatatggtgcagactttggtgacagaatagaaggctgaatcccgatctgtggtgtcctcctagctcttacgagagtaagttcccctcttaagctgctctgtctatctgctctgtagaacgttctcgaaagtatgtatcttctcctacactaaccttcccctgatgaccaagctatctttgagccgaatacttcctttctatgtgccccaatttgatcgctagtctgataactctagctgacggccggaaaaaatgtacgctaattttggaagactacgtgagcttatgtaatcctattccgccctttgcattaagctaagataccgatcggctccgggatatggcagaagtcggctttgtgggccggcctatttgtggtccactatacagtgatggtcttgtataatatccacaatttaggtagaccgatattgtggtgaacctaccccggtttatgaagtaatctctcttgggacggtaggcacagatttcagtaatgccaaaaagtcagtggagcagaagcctaagctttctatgacgatcatttatgataaccgtattctcgcatggaacgaatttccttggtttatctaaactatgttatcaaaatgatttgcggttctacagttgattaatagtcccgctcgggttccacggcctttgtgacactctattttgttaaactatgagcttggtattccctcgctagtattataattttaagggatggtgattttcatatttcttgatatccgtgaagtgatatatacaacctctcctatacttatattttactgtagcttgtaatcttctgatatgtatcgggcctgtagagaggattcaacttcgccattctgactagacgacttcgctctgtggggatatagcgcttgtattaattagtagtaaaaacagatatttgaagccaattgcataatctgaatcccgtatcgttgggcaaggtgagcctaaagccccgctccctctaggtcccatttaaaagctaagatagtaccgttggttgatcagaagccttctaaagcttaatgatatgacttatggacccccctggtcagtgtatttggtaaatctgacttgtgaaatatcgactctgtattgcagaatccctcagactcccaccaatagaataaattccaaattctaagaacaagcaatttccaatttcatacttttacagaattattcttagatgtaaatactgtacgttaaaataaaaccagcaacaaattctcggaccaagccccaccgggtatcgaataatataacagactttagaggcaaaaactttatctttcggcaagtttccttcccctagaatcgaatacccttcatgactgattggttaaaatcgattccaaattgcgcggctaatcagaagtacggacagaaaacaatagacgttacaaaatccgatcgtaagttttagtttaagaaactaactctctataaagcctatatataaaggcctgtgcgacttctttaacatttgacatttaaccgtaactagggacactcgttttctcgttacaattcaggcgcaaatatagatagaatgagagaactcccaaattttaatcaagaatactttcgaagccaattgcaacgtacactatctatttcaacctccgggtctgagaatacacagagtccgtcaaggtctgcagcaggtgataccacagaggagtcctcttatcacgagaacgactctttaagcgacctacacaataccaactcagaacatcctccgcaaatctacagtataggccccacatctaaaggagagcaggaactactccgagaggctgatctatctagagattacagtatgatcgccttccactatatcgcagagtaagtgctgcgattccccagaaataatattttgtggtatggctacttacgacactcagactagatatccgaacaaagtcagttatacgacctaccagagaaagaacaaagctgatttagtagcaggactatacaaaatctattacatgaccagagcggctggattacaactattcgcagtgatctaaaggatatccgcagtcagttagcaggtattaagatatacaaaatctattacatgaccagagcggctggattacaactattcgcagtgatctaaaggatatccgcagtcagttagcgggtgttgagacagctctagcgataatggctagagggggggacgatactatagagagtgatgcaaataggcgaacgcgtcggccacagcagtaattaggatcaaatatgatgattaattttaactttcagggcctgctattagcccttattggccgagatatcatgattacattatgctttacgaccaaccatatctcactagagcagactcgggctctaaggatatatataactgtatggcggcggaatagtaggcaaattgccttaagatgaattccccctcaccagtggtagtcgtaaacagatacaaaaagatatatcattacagttattagaagttcaaacgcttagggatcattttagccacaatcctctccctagcccactggatcgttacagtccagtagtggatcgatttgagatatatagactcggttttatagccttagtagagtattcccaatcttatgacccaagatagcccacttaattgagtttcgatttataggtgaacgagaaaatactatatttcatactagaatcctagtcggtcgtttgggtttctattatctaccgagtagctataagcttcatataccaagggccgtagcggccagtaaatttcttcataaatagagagtcacatcgcctattaaatgataggtagagcccacagtcacgaggaaacagattcagttgcttccggatcagcgtataatctccccgggatatggaccctaccgctacgcccatagaaccttccctctgcctcccaagctacgctccgcggagcaaaagtctaattatcaaaagatttacatcaatatttcttatatagcagaacagcgatcaacatcaaccttacctctttatttttactggtatcataagatagcagcttattccaagagctatctctataggttaggtatataagactaactaggcggttcctccacaatgaatttagcacattcctaacccctaaatatatggtgtttcacacaagtgattcataatggtttcctagagctacaggctcctaggtcgcaaccggataatcacccaaggcgggaaacccgggtagggtattatgacctagagctccaagcgacccgtgctactcgggccaacttccgtacatcaccgcagagtcaggcaaatagggtactggtccaggattctgaatgttatcaatcgtgctcaagacccgagtagccgccgataccagctcgctatacgtctgatataagaccgcctgaatgtcgtgccataagacctgatcctccatagtagcgttcgccgactcctactgctgctgtatctagaagagctctttttcaaacctctcgttctcagccaaggctttgtctcttaccataatagattgtcatagttccgaagctccctaggccttttcggccagtaggcgctgaatcacctaggagtcataagctctctctttatccatcttcccaagtgctcagtcgaactcttattagacctagtccatcacatccaaacattttcgatagatcgccttataagctttcatctaggcgctttttatcacagaatatccctaaaaacgatcgtcaggtaagaagactttataaatagagagtaacataccagccctttgtatagcttggctaccggcttaagggggtcacagtctaccttagatgtagggaccgtcgaccgatcagaataaggcgaatcggtacacaatctgccagcacgaggctttactttagcagcaccacggcctgcgctattcccagaggacttagagttatgtgccataatggatccgtccgttcgagggataattgctaattcatataatacgccagacaaaccacatttgagtgcggttacctcctagggagcaccgattttaaaggcttaggtggggactaaatcaaaagatctgaaacgaggtgaaataacagttcgcccttaccaaggctttgttactagcatctggatcgtgcctattaggtattagcacgaaatgaaaaagaaaataaaaagaaaatagaagaaaagaaaaaggaaaatatggcgatccattatagggggattaactagggccgacacagaactacattcatctaatcagtggtatctcaatacccgctctatccaaaataatctaagcctcttatagttaacgccctcacattggtctatgaatagagtcgttattgagtaataacagtcatcctcgccctctacgcccttttttgataaacgtttacaaaatttacatttacatctacgtataactctcatattaaacagtaaacttccaaaagcccaggtcatcatctgtttagtatagaagtactttattataacagagttaggatctagattctcggaagctccaccatcgcccaaaccagggcctggtttcccggacaaccatataagccattttagctaccaaggcttatgaaactctaccccacaaaaattacaacgctactatcatactttataaggccctaggccacaagaagtactagtagcacagagaaacaatacccccgtaaatgtggaccaaggatggtacatacagttctacgatgaaaagctcagcgataatccatgggacagtagatcaaggaggttctatttatggcctagagaagaaacagcaaggacttaaaaaggcctagtacagtctacgatccaagacatgacgggctgtttgcatgcggatggaagaggtcctgtgttactttggcttactgaaagggccaccctcataggtacagtgggggcaggtataggatttggaataccatacagatttccgataacaggtcgacgacattatagcgactatactttaacacccctaaaggttgctactataggttagatttaaccacagttaatctagaaggtaagtagggcggaagtctatagaatgctttctgagttgaagcttaaatccaaatgattcatgaataatcacgtttttccccggccgagtatttccgcggttcatcaaaacaattcgtccatttgattttggtatttagctaacagtcaacggtcccgctcttagtttcacccttattataaggttaactttctccgataccttaaatccaagggtccttcttctagctgcactagaacatatcgttgaacatatcgttgaacatactttttattaaacatgaaacggcgtaaatcaatcgtatggctcacagctctagagtttagaccgccctacttccgacccaccgaaccaattcactatgctagaactatagactccaaagcttactccttcaagtcgataaaagtccagacaccatcataggctctcaggtagcctttattagctttcatatcataagctcataaccaggatacatatgtctttgttccatcaggcttaaataaatctagctatagcctccattctcaagttccagcttccttctactcgtggaaatccctaagtgagcatagatacagtcataaccagcttacccccgcaagtgggggctatccttatagagaatatctcaatcgttcagattgtgtccatattctcgatcggcgcgtacaatgtcttggaaatagggattgtcacattcgatacatttaagcgctaccggggcctgtatttctagagtatacaggttgcatcctggggaatccttgtgcatgcgcttcctgccatggcccatttcatttctcaagcatccaacctccccacagcaattcccttcatgatcagatggtacgccatggttaccggccaagccgttgtactctactcgcgtctatacctcgttatctccgacgcgaggaaggtgcggtgggtcctatagatgatcattaccaacgcttacatcctctatattccaatgaccgtcctttttttcggcctcaactacagcgacacacgcttcgcccatcctactgcgatatttgaccgggttcaatcaaccggcttctgcatccaagattttattatcagcggtatctacatatataaagcagcgcgtgctttcaagattatcattacactccgcagtcgcgacggccgcaacgccatcatccatctactttatatcaacattctcgtcgtgatcctgaacgttctactcctcctaacggagtataagctccactacgttcaagtcagtttcaagacggtagtatacagtatcaagttaaaactggagttttccatgctcaaccgccttcggttgctagtacatacgaacccttacatttgtcagcgtggacccgagggctaacgccgaccaagcgataggaatattttcggcaaggtttcttcacgatcacttaccgcaccagacatcagagttcaacctagtattaccgaagaagagctaccacaacattcactgcggccaggtaatatctatggataccataaagagcaagttgaaactagagttttccgtactcaaccgcctacagttgctagtacatacgaacccttacgtttatcagcgtggacccgagggccaacgccgaccaagcgataggaatattttcggcaaggtttcttcacgatcacttgccgcaccagacgtcagagttcaacctagtattaccgaagaagagctaccacgacattcactgcagccaggtaatatccatggataccataaagcactacgccagatatcaagcgatagtataatactccctgaagatgcttcctattcaggaacactatccgagggtcactcaagcaccccttcaagtagctcttcagagaccctacctaggctagaattaactctatcgcaattctcaccaaggcttgacgtctgagcatcccacgaaggaagcttcttactagcatcggacaagctggcggcaccttaatccaagccctccatttgaaaaaattttacacggtataattagtgaatcatacttcagatgatacggttctatgattgctcagtagatatcgtcgacatcgatatatcagtacgatagctaccaagagactcgcagattaagatagaatggttatcacgtttacagtccaataaagagcaaagcaatatataacgaattaagcctcgtatcatttacatcgaagcacatcgttccaaattattcgccataaccccatttattttcagcctacgcagcctagcaatagaatcgttattctgcctacaaaggactatcctagaagacaaaggtagctaccagggaaggttcagattgaaggaaacaattcttatatagctaaataagcacgaataactactaaggagttcgatttccttccaattcctactatacctttcgtttgagatacctaatcctagattttgctttagtcaatataatcagctgtgtcttacaataagataggttaatattttcatataggtctacaacacttatacgtgaagcatcaacactcggtcgacagagcaattataagggggctgttcagcaaagttcaaagaattatgatttacctcacttccaaacgaggagaaagtatagtagaagtctatagaaggtcaagttttcatatagagtgataaagggtaagtaatattagggccaatttaggttataaggtgcatcataagtttaaacgtccttcgatttatatacatttcggagatatatcaagctctagccaatcctggtataaccttttatcacatggaatttagtcggatttaacagaagaaggccatcatccctcctactatgatactcatgaagtaatcttttctttcgcaggcagttacattttcggcaaataaacgttggcctagacgtggttcaatagtatcggcaatcctaagaggtacataaactgcatacccatcactatggctaataactcaccgggaaaatcgaccgacgacacgcccaaacaatcgcttactttttctcctatgtttatcgccaacatggatggctgttttactagacagaatgtagacattcgtcttccttagcctagaagtattgttatacataatagcaacagcaaatatcgtccgtataagggcgaacctaaatttagtcccgttcccatcaccgatacagtcgacctcagggatactgactctatcacaggaaattccaacgatagcttatctgtatggctaccagggtgattaagctcacatatatatcggaacgtgagatcgggttctacagcattgagatatatagactagagtgtgcacatttatctggctgaatcgaaatcgcccgcgaagtacaaaatcctagtctaatattcgtgacctctcttattgattcgaaatctggtctcaatagtctcgttccagcaagggaatgcatctacaaaataatgatcgtatttttacccagttggtatgatcatatccagtaacaaataaaactccttacgttacaaagaacctagaataccgatacgtcaaaacagcgcgcaagttaagtcagcgtctgcagagtagtcgtacaactatcccaaatttgctctaggtatttagtcctaaaatacattacaaactaccaccgacggcaccatgcttaatctatcaaatatccgcccttagctttacttaagtactaatcacattgtatccaaacagcaaagataaaagatagggccgcaagatctttctcggcttggtagaccttcaaggaaagagccaagtcgacaccaataagtcattcgttcagcaacacacatagtaatatttgataccgtgataagcagtcttattagctacactaaccaataatttcaactcaccttcgcatgaccctcaggtaaaaatctcattctatcatattagctaagaatggcataagatggaatgagcttacctgtaagatttgctcaacggagacactttccagctaacaaggcagattttgaatttccggttcccattcgtacatacaattcttcaacatcaatttagtaacaacatcagctagagcgcataatttcgtcatcgcaggattcatttccaattcattaatttagcagctattctcgactcccactaaagaaggttagcctatctttatcgatatagactataccatcgggtgcctcactgatcctgacttcacccgcccgtataagcaggatggtttccgggcccagggtggcgagtgctcttccgagcccgcgcagatattggattccttctaatacctattcaatattagtctcaaatgtacctgcaagacaattgtatttaacacactggcttaacaattccaacgagttcatcggttgtaatagagcagctagaggctagaatgtggctcactgacacttccgttagttcccagattaacgtgcacaatgcgttatagtggtaaacttagagcaattttaagaagcttggataagagattccttccatcagttcttaaaaacctggggtaggagagaactgttattcaagttgttagatatacaccaactttcctctgttcatcttatgccgggcaaataccaaagaccgatcttatgatctagcagcaggctcgaaagtatcccatggattctagttaagttgtggaatacttgcagttgagcgaccaaagcgtaggttcgttaaaacagaggcgattgcagcggtagtcattatctagatatctgaaggttggatacccagagaggcagttggttttgaactcagctgctcatggcaggaagactgatccagccatacagtaggcggccggataggtttagcctgcttgcctttcatattactgtataggctttgcggtataaaaagacaaagtaagaagacaattcctaaggcaactaagactctttataaccctagaacatttcttcaatatatgcttttcttactcgtaacaatattttcaatagcaaactaataacattagatctttcccactgtatggtgaaataccgcaagtatataaaggtacataacggcccgttgatttaagcatccgtttccgttattaatgtccaaaagatagaataccgtcgtctatattagaaggtagtttatttaaaaactgaggttttgataagtctcatcgacgattgagattatgcggaactaatttaggattaattaccccctcaaatgtactgatactcggtggttacaataccaggattaccaatatgactttatttaccacataacatcgaaaagaatgtaggttctagtatacataaccattctgttcttattctagattatgtgataaggtatcccttttatcaatcgcagcaaccgtactcaccgctacggctctattctgcagaggatatcgaacaacaaaacatacatcatagactttcatcaaccattttgattacaaataggagcagatagcataaattcagccatctagtggttatgttatatttcgaaatccttcaaccggtatggtaggttcgatttgtatatgggtaggaatatgagctgctgtgacagccctaactgtactcagaatccaccgcataaatgtagggtttaccaaagtaaacggcagggcggcattctttcagacaagcgttccggttgttttcatgttctgagcggtcatcattatatattcgacaatatggtggttcataattatatcacgtacaataccttcgattcttaaaatggttaacctataaactagcaacctagattttcatcaggcttagtacttagcggttttatgccaccggaacttcgaatattcaaaatcagtttcaactccaatttctttttccttattacagaaggccctacttcaagtaaactagcccaccatatttccgccagactctcatacatcaatatatttttaatagatcatggtagattacacgtaatcccacagaatagttaacaattgcattcagcttccgcaattaacgtcaaaccctatcaacttcaactctcattttcgaacaatttttcaaaaaatagaaggacgagttacataatacctagtcatataaaaaatccgtagtgagatgtnnnnnnnnnnnnnnnnnnnnnnnnnnnnnnnnnnnnnnnnnnnnnnnnnnnnnnnnnnnnnnnnnnnnnnnnnnnnnnnnnnnnnnnnnnnnnnnnnnnnnnnnnnnnnnnnnnnnnnnnnnnnnnnnnnnnnnnnnnnnnnnnnnnnnnnnnnnnnnnnnnnnnnnnnnnnnnnnnnnnnnnnnnnnnnnnnnnnnnnnnnnnnnnnnnnnnnnnnnnnnnnnnnnnnnnnnnnnnnnnnnnnnnnnnnnnnnnnnnnnnnnnnnnnnnnnnnnnnnnnnnnnnnnnnnnnnnnnnnnnnnnnnnnnnnnnnnnnnnnnnnnnnnnnnnnnnnnnnnnnnnnnnnnnnnnnnnnnnnnnnnnnnnnnnnnnnnnnnnnnnnnnnnnnnnnnnnnnnnnnnnnnnnnnnnnnnnnnnnnnnnnnnnnnnnnnnnnnnnnnnnnnnnnnnnnnnnnnnnnnnnnnnnnnnnnnnnnnnnnnnnnnnnnnnnnnnnnnnnnnnnnnnnnnnnnnnnnnnnnnnnnnnnnnnnnnnnnnnnnnnnnnnnnnnnnnnnnnnnnnnnnnnnnnnnnnnnnnnnnnnnnnnnnnnnnnnnnnnnnnnnnnnnnnnnnnnnnnnnnnnnnnnnnnnnnnnnnnnnnnnnnnnnnnnnnnnnnnnnnnnnnnnnnnnnnnnnnnnnnnnnnnnnnnnnnnnnnnnnnnnnnnnnnnnnnnnnnnnnnnnnnnnnnnnnnnnnnnnnnnnnnnnnnnnnnnnnnnnnnnnnnnnnnnnnnnnnnnnnnnnnnnnnnnnnnnnnnnnnnnnnnnnnnnnnnnnnnnnnnnnnnnnnnnnnnnnnnnnnnnnnnnnnnnnnnnnnnnnnnnnnnnnnnnnnnnnnnnnnnnnnnnnnnnnnnnnnnnnnnnnnnnnnnnnnnnnnnnnnnnnnnnnnnnnnnnnnnnnnnnnnnnnnnnnnnnnnnnnnnnnnnnnnnnnnnnnnnnnnnnnnnnnnnnnnnnnnnnnnnnnnnnnnnnnnnnnnnnnnnnnnnnnnnnnnnnnnnnnnnnnnnnnnnnnnnnnnnnnnnnnnnnnnnnnnnnnnnnnnnnnnnnnnnnnnnnnnnnnnnnnnnnnnnnnnnnnnnnnnnnnnnnnnnnnnnnnnnnnnnnnnnnnnnnnnnnnnnnnnnnnnnnnnnnnnnnnnnnnnnnnnnnnnnnnnnnnnnnnnnnnnnnnnnnnnnnnnnnnnnnnnnnnnnnnnnnnnnnnnnnnnnnnnnnnnnnnnnnnnnnnnnnnnnnnnnnnnnnnnnnnnnnnnnnnnnnnnnnnnnnnnnnnnnnnnnnnnnnnnnnnnnnnnnnnnnnnnnnnnnnnnnnnnnnnnnnnnnnnnnnnnnnnnnnnnnnnnnnnnnnnnnnnnnnnnnnnnnnnnnnnnnnnnnnnnnnnnnnnnnnnnnnnnnnnnnnnnnnnnnnnnnnnnnnnnnnnnnnnnnnnnnnnnnnnnnnnnnnnnnnnnnnnnnnnnnnnnnnnnnnnnnnnnnnnnnnnnnnnnnnnnnnnnnnnnnnnnnnnnnnnnnnnnnnnnnnnnnnnnnnnnnnnnnnnnnnnnnnnnnnnnnnnnnnnnnnnnnnnnnnnnnnnnnnnnnnnnnnnnnnnnnnnnnnnnnnnnnnnnnnnnnnnnnnnnnnnnnnnnnnnnnnnnnnnnnnnnnnnnnnnnnnnnnnnnnnnnnnnnnnnnnnnnnnnnnnnnnnnnnnnnnnnnnnnnnnnnnnnnnnnnnnnnnnnnnnnnnnnnnnnnnnnnnnnnnnnnnnnnnnnnnnnnnnnnnnnnnnnnnnnnnnnnnnnnnnnnnnnnnnnnnnnnnnnnnnnnnnnnnnnnnnnnnnnnnnnnnnnnnnnnnnnnnnnnnnnnnnnnnnnnnnnnnnnnnnnnnnnnnnnnnnnnnnnnnnnnnnnnnnnnnnnnnnnnnnnnnnnnnnnnnnnnnnnnnnnnnnnnnnnnnnnnnnnnnnnnnnnnnnnnnnnnnnnnnnnnnnnnnnnnnnnnnnnnnnnnnnnnnnnnnnnnnnnnnnnnnnnnnnnnnnnnnnnnnnnnnnnnnnnnnnnnnnnnnnnnnnnnnnnnnnnnnnnnnnnnnnnnnnnnnnnnnnnnnnnnnnnnnnnnnnnnnnnnnnnnnnnnnnnnnnnnnnnnnnnnnnnnnnnnnnnnnnnnnnnnnnnnnnnnnnnnnnnnnnnnnnnnnnnnnnnnnnnnnnnnnnnnnnnnnnnnnnnnnnnnnnnnnnnnnnnnnnnnnnnnnnnnnnnnnnnnnnnnnnnnnnnnnnnnnnnnnnnnnnnnnnnnnnnnnnnnnnnnnnnnnnnnnnnnnnnnnnnnnnnnnnnnnnnnnnnnnnnnnnnnnnnnnnnnnnnnnnnnnnnnnnnnnnnnnnnnnnnnnnnnnnnnnnnnnnnnnnnnnnnnnnnnnnnnnnnnnnnnnnnnnnnnnnnnnnnnnnnnnnnnnnnnnnnnnnnnnnnnnnnnnnnnnnnnnnnnnnnnnnnnnnnnnnnnnnnnnnnnnnnnnnnnnnnnnnnnnnnnnnnnnnnnnnnnnnnnnnnnnnnnnnnnnnnnnnnnnnnnnnnnnnnnnnnnnnnnnnnnnnnnnnnnnnnnnnnnnnnnnnnnnnnnnnnnnnnnnnnnnnnnnnnnnnnnnnnnnnnnnnnnnnnnnnnnnnnnnnnnnnnnnnnnnnnnnnnnnnnnnnnnnnnnnnnnnnnnnnnnnnnnnnnnnnnnnnnnnnnnnnnnnnnnnnnnnnnnnnnnnnnnnnnnnnnnnnnnnnnnnnnnnnnnnnnnnnnnnnnnnnnnnnnnnnnnnnnnnnnnnnnnnnnnnnnnnnnnnnnnnnnnnnnnnnnnnnnnnnnnnnnnnnnnnnnnnnnnnnnnnnnnnnnnnnnnnnnnnnnnnnnnnnnnnnnnnnnnnnnnnnnnnnnnnnnnnnnnnnnnnnnnnnnnnnnnnnnnnnnnnnnnnnnnnnnnnnnnnnnnnnnnnnnnnnnnnnnnnnnnnnnnnnnnnnnnnnnnnnnnnnnnnnnnnnnnnnnnnnnnnnnnnnnnnnnnnnnnnnnnnnnnnnnnnnnnnnnnnnnnnnnnnnnnnnnnnnnnnnnnnnnnnnnnnnnnnnnnnnnnnnnnnnnnnnnnnnnnnnnnnnnnnnnnnnnnnnnnnnnnnnnnnnnnnnnnnnnnnnnnnnnnnnnnnnnnnnnnnnnnnnnnnnnnnnnnnnnnnnnnnnnnnnnnnnnnnnnnnnnnnnnnnnnnnnnnnnnnnnnnnnnnnnnnnnnnnnnnnnnnnnnnnnnnnnnnnnnnnnnnnnnnnnnnnnnnnnnnnnnnnnnnnnnnnnnnnnnnnnnnnnnnnnnnnnnnnnnnnnnnnnnnnnnnnnnnnnnnnnnnnnnnnnnnnnnnnnnnnnnnnnnnnnnnnnnnnnnnnnnnnnnnnnnnnnnnnnnnnnnnnnnnnnnnnnnnnnnnnnnnnnnnnnnnnnnnnnnnnnnnnnnnnnnnnnnnnnnnnnnnnnnnnnnnnnnnnnnnnnnnnnnnnnnnnnnnnnnnnnnnnnnnnnnnnnnnnnnnnnnnnnnnnnnnnnnnnnnnnnnnnnnnnnnnnnnnnnnnnnnnnnnnnnnnnnnnnnnnnnnnnnnnnnnnnnnnnnnnnnnnnnnnnnnnnnnnnnnnnnnnnnnnnnnnnnnnnnnnnnnnnnnnnnnnnnnnnnnnnnnnnnnnnnnnnnnnnnnnnnnnnnnnnnnnnnnnnnnnnnnnnnnnnnnnnnnnnnnnnnnnnnnnnnnnnnnnnnnnnnnnnnnnnnnnnnnnnnnnnnnnnnnnnnnnnnnnnnnnnnnnnnnnnnnnnnnnnnnnnnnnnnnnnnnnnnnnnnnnnnnnnnnnnnnnnnnnnnnnnnnnnnnnnnnnnnnnnnnnnnnnnnnnnnnnnnnnnnnnnnnnnnnnnnnnnnnnnnnnnnnnnnnnnnnnnnnnnnnnnnnnnnnnnnnnnnnnnnnnnnnnnnnnnnnnnnnnnnnnnnnnnnnnnnnnnnnnnnnnnnnnnnnnnnnnnnnnnnnnnnnnnnnnnnnnnnnnnnnnnnnnnnnnnnnnnnnnnnnnnnnnnnnnnnnnnnnnnnnnnnnnnnnnnnnnnnnnnnnnnnnnnnnnnnnnnnnnnnnnnnnnnnnnnnnnnnnnnnnnnnnnnnnnnnnnnnnnnnnnnnnnnnnnnnnnnnnnnnnnnnnnnnnnnnnnnnnnnnnnnnnnnnnnnnnnnnnnnnnnnnnnnnnnnnnnnnnnnnnnnnnnnnnnnnnnnnnnnnnnnnnnnnnnnnnnnnnnnnnnnnnnnnnnnnnnnnnnnnnnnnnnnnnnnnnnnnnnnnnnnnnnnnnnnnnnnnnnnnnnnnnnnnnnnnnnnnnnnnnnnnnnnnnnnnnnnnnnnnnnnnnnnnnnnnnnnnnnnnnnnnnnnnnnnnnnnnnnnnnnnnnnnnnnnnnnnnnnnnnnnnnnnnnnnnnnnnnnnnnnnnnnnnnnnnnnnnnnnnnnnnnnnnnnnnnnnnnnnnnnnnnnnnnnnnnnnnnnnnnnnnnnnnnnnnnnnnnnnnnnnnnnnnnnnnnnnnnnnnnnnnnnnnnnnnnnnnnnnnnnnnnnnnnnnnnnnnnnnnnnnnnnnnnnnnnnnnnnnnnnnnnnnnnnnnnnnnnnnnnnnnnnnnnnnnnnnnnnnnnnnnnnnnnnnnnnnnnnnnnnnnnnnnnnnnnnnnnnnnnnnnnnnttgataacccccgagccgatgaaaccagggcagagcaggagtagaagcagcagtagaaggtttctgttaggcagccttcacttcgatagctttgacacttgagcttcatgtgcttgggtacctgtggagacagacaactttggaccgatagtcgagctcaatttaggatagaagcagaccgagtggtttgacccagacgaagttaaatctatgacataggcttttcccacaaaactttgtatacgagtagttttaacagtttagggaagccatcctatataccaattccattcagagcgaaagagtacaatttgatctagatactaagtacagaaggggaaagagaaggagagggacgctaattagctggtacagggctttttgtgggtttaggtataaatcctgcaaacaggggataactcagccacgaagctcagggaatcctccaacttcaagtctatacagtgacaggtagcagaacacctagatcgtcacatatccatccagccacgagactccaatagaagccaatgctaaaggaagtagaagacatgggcttcaaacagtttctgtataacctgcaggatctggtattaaacgtgaaacagaaagtagggaaaatcataccgaaatcctggtaagtagacgacggaaaatcgtggtcatgcgagtatattagtcaatttatatagcagaaagatttccaaaataacaatagctcaaaaataacaatttaatgggataccattcataagcgaatgcacagataaaagtcatataggtctgtaaaagagcctatacagaaacggtatcaatcttggtttctaggcgctagggttgtcaatttttaggtaacaaatcctcatatagcaaatctttctttttaggccagggaggtaataggagctaaggaatttagacttccggcaatctatgatcaaatctgtgaaacgatacagcctgcgagctggcaaaactccctaactacaattcatcgcatatatataagtaactcgttaactaagagtgaggtgaccgtttgagtgggtgacatagattcctcatctttccaagtaggtgataacatcatattactacgggctaatcaactttacggtagctctcttatatcacaaaccccaccttaattgtttcgttagattacatggaagcatcaggcatataacaacgaccctttttccttcatagtaccttaatatttcgtgaacaaacagtataatcgcgctagcgatcttgattctaagcagcctactacttgcgattccagtggtataacccttttaccgtccgtattctaaacatactaagtatataccaggcttccagacccttaaaggcaatcatattcccaccagagctggtagtaagcaatgcgatttatatagctcgatatcgccgggacttgcgctaataatcttttgcaatttacaatatagacacctatcccactacccgcacacggcataaggcgagactacaatctgtctagtaagccaacaagtaagaaatgtaatacctctagaaatagtctatatcctgataccatgttctagtttctatcgatccaaacgcgaaacacggtcggctccaccaacatctccgggcacacgttacacgtaggtagcattagaaaacagtcacagggcgatggttattccgtttcatcgttactgctaggtcatttcccctattcaactgaagatagacattaagtttctatcttcgataactctattaggcctagcgttactaaaaatagaatttgaaaaacaatcaaaggagcaaaatggtgatactgagactattatatacaacagattctattgcctagctactattctgagctctatattcttgaggtacaccagggatctactgtgccctaaagtgaactaatcgaggacagagaatttatattgctacgagaccatacaacgattattctccaagtgatgcgccagagcttcccatttctggttctaacgagttggaggaca

SEQ ID NO: 163 - DNA, 89350 bp, Penicillium roqueforti; identical to SEQ ID NO: 115
  misc_feature (21055)..(26782): n is a, c, g, or t
  misc_feature (30124)..(31815): n is a, c, g, or t
  misc_feature (36457)..(42376): n is a, c, g, or t
  misc_feature (65640)..(66338): n is a, c, g, or t
  misc_feature (74715)..(74862): n is a, c, g, or t

SEQ ID NO: 164 - DNA, 60440 bp, Penicillium roqueforti; identical to SEQ ID NO: 116
  misc_feature (49442)..(49753): n is a, c, g, or t

SEQ ID NO: 165 - DNA, 53928 bp, Penicillium roqueforti; identical to SEQ ID NO: 21
  misc_feature (1304)..(5918): n is a, c, g, or t
  misc_feature (9441)..(14428): n is a, c, g, or t
  misc_feature (21327)..(21571): n is a, c, g, or t

SEQ ID NO: 166 - DNA, 29939 bp, Penicillium roqueforti; identical to SEQ ID NO: 22
  misc_feature (3252)..(4738): n is a, c, g, or t
  misc_feature (11014)..(12231): n is a, c, g, or t
  misc_feature (25939)..(27449): n is a, c, g, or t

SEQ ID NO: 167 - DNA, 28527 bp, Penicillium roqueforti; identical to SEQ ID NO: 23

SEQ ID NO: 168 - DNA, 28219 bp, Penicillium roqueforti
  misc_feature (20958)..(21052): n is a, c, g, or t
  misc_feature (25456)..(26706): n is a, c, g, or t
cgggttgtatgtggtggcggctcgtatgtgaattacgttatatagattagtaactaggtactagttactaagaaaagtgaagctttcctctaagatagatagatcttagatactagatcgagctcttatatctataataatagggattagtttattaattttatactagaagttaactaggtaactactagagatagtttaataaaaatcctaggaactaggactattaggcttataggatagtatctagaaactagaaaaattaagattaaactaagtaatatactatattcgctaaccttctatataaacctagtattatatatagccctataaaggaaaggaggtttctagtactaatatactaactatatataggatcctaataatctccctatcattaatatatacctataggattattttaatctatagattttcaataagctagataagaaggtacccttataggtatatactataagaaccttagtaaagctataagaaataaaaagcttagtagatatctggtactaccgactcgcttatattaataagtatactatagcaaagcttactactatagtagatagtattattattaaaaaagaagaatctaaactagaggataaatctctatataaaatatactatattagcagagtactaaggtagatctctagatacctagttagctatatatttagataattcggaagggtatattttaatctaatatagttactactagtatataataagtactattagatctcctacttttatattaagggtctaagattctattagattataatatataagataaaactagaatactaattagctattaatcaattcgttaagctagtaaggaactaatagaagctactaattaaagctttctactataataataagctattagctagaaaaatattagaatatagcttaataagtaatagtatcttaatctactatactctacctagctatattaagataaatggttatatagaaaggtctagtagaatgattattacctatatataaatactcttaattaaaggaaagcttcctaaagatctatagctagaatttgtaagtatagctatctagttactaaactatatactattatatataactaataagaaccagtagatagtactataggaagaggtataaaaggaattcggtataagtttactaaggattaacctagctaatattaggttatatagaagcttagtatactactatattaagaagtaggtaaaatctaataagatagttccttaagtagagattagcttcctagtaggctatcttacctctaatatttataaaatctagttcctatatactagtaaagttagatatattagggatatagttattaataagacctataaatatatactaatatataagaggtattaatagatcctactaccgatagtagaggaactataagagcttattaataaagaaattatataagtacttaattataagattattagctagtaggtagctataatagatactactgagatatagtataactttaataatagcttctagtaagctactaaacctatcgaataactataggaagaaatataggataggatataagagggagaagggtagtaagagactaccctgaattaggggataagctatataataagcctactaatacctaattatctatttaaagccctattagatatatttctaaataaactagacctactactactactagttatactactagaagaagctaaactagatactagctctagttagagggtagatactatatataaaatatagtaagttaactagacctagctcctaaaaactagtaaactataaggataatctaaggataagctatataataaactagaaagatagctttaggctaagctactagtactaagtaggtagattataggagatattaataaaggtaatataataattagaaagtatatatatataaggaagaactttacttatactaccgcaatagtaaataaagagctactagccctcttatatatatttatagctagtctatatatagagaagctagatacttaatactatagagataatcttcctctactactaaagtactagaaagatattatattataccccttttaagaaggtttccttatagtaataagaaaagagattaactcccttactaaaaaaggaatatttaaagttattaataaactaaaggataggggaaagtaaatactacctctattataggtctttatatataaattcgactaagatagctatcttataaagtttaaagcctatatttatatataaggtaatctcgaaataatctcttaagaagaaaagagagctataatactagtagtaagaatagtaaggataatctttatactagttactacttttaatctagatctatactagcgagatactataacagccttcctaaatagtaaactagatagaaggaaagaaatatatatatatatactagagggattttagatccttagtaaatattagaagttattataagtattatatagtttatagatcttactataactttagtaataagaagtagtaagtatcttatataagttagggcttaagtaagtccctaaagatctatatatttttattagaaaaggactaattatcttcttctatatagataatatcctaatcgcctattatatattagtaagggatagggtatactaattagaaaaggatcttaaaacctattaggagcttatagattatagagaagctagttggtttcttaatatctaaattatataagatagatagtagaagaagctatagctatactaagatagctatatagtaagtattactacttactataatttaattaactacctagctatctatactctactataggtcgaagaactaaagctatactaaggtattactatacctagagaaatttatctctactagtagaaggtaggaatcttagctagctatataactattattactagactagatatagtaaaggccacggcctagctagcctaatttcttataaaccctagcctatagtactataaagtaatcaactaagttatttcttatctctatactacttataacctagtaattaaatatagcgctaatatagtaactactaagatagattctatataatttgtaagtaatacctcttatagagattacctagattagaaaagcttagtaggctatatttactaagtatatagagggctagttaactagaaagctactaagtagctaatagtaataatattaactactaaggctaagcttctaggcctatctaaggtcgggaagtagctctaatagtagtaataactactagatactattagctttatactatcttatactcttacaatcagctgcgataataagtatatagttaacctaatataaagcgaggatatagtatataagataaagctctgatatatagatatctattaccattagcttcgataagaggttaaggaaggacgaatttatataaagtgggttactatagcgaatatagtcgctgatagactaactaaggtactccctcgctagaagtataataacttcatcagaatgctaaggatggtagatataggccatctggtataggccagtaagtctatactaggcttactaagggggtgtgtcggagtatgtaagtcagtataccggaggataccggaggatctattaatcctaacaatgtgtattgtttattttagtttatgtaatcaggctctataaattgccagctgagctagttcagaaagacagactgattgacacctatttattggaccatatattttatggatatggttaatccgatagttatgagcccggtttacaccgaacgagactactagtgactaattgctatagaaagtgtcttacgaagccctattaaactatctattccttcctcccttaacgaagctatatagttagctatcacttactactactaatagaagtagtatcaatcctctccgctataaagggcgaaaaactgaaagatataccctaatagtatatctggtatactaaagtataactttatactacctaaaagaacgtctgggatctatataacccagataccccggtagatactaggcctactatccttactaaactagtagaaccagcctaccccttagataataacgataagaagctttgataagtttagtgagacttaatagacttatataagataaagtatactagataggagaaataggctaaaggattaagtaatataaacgaatatatccttacctatcttaatcctatataccatctctctatcctactatatataactctatataagagactagtctacctaaaagctcgcttcgctaagttaacagtatataaagaagagatccgaataaactagaagttattcgctatatagaagctaactagagatattaaataatagctctaaaagtagaacttactaagggagtaagctattagcctaggtattagtaatagcgatactaatagagacttcctatatatagttaaggaagtactactaatctagtagtaaggaaaatactaagaagtagttatagataagaagaaatataatacttaagatcttcttaaatctttctacgctataaactaggagattagggttaaaactattacctctactaatactctgaaaagtaccttctcgacttagtaaaggaatccagaagctaagctagataaagagaagtaagagaaggaaaagtaggagaacttagaagtagtcgaaactcccgtttaagtaacgaaggtatctatatagctataactacctaaaatatcgggtaataacctactagattataaataaagtggcttaactagagggttttatactaagtaaagataaactagaaaaggctaagaaggtattagctaaagatactacctagaagtaataggttaagaaaacggtagtagaagcttagataaaaccttagtaagctctttagtaagttcctctataagtagaagtaaagccttaataagtggtaaataccactatctagactagttttactatatttatatactatagtctataagctaacgtaattcacatacgagccgccaccacatacgacccgccaccccattcaataatcgtgaatttcactgatgccgggacccactagaattccgtcgcagcatattgatgatgctagcactttcttcatcgtgggtcatagctgccggtccactaagctgtcgccgagttatcgctaacaagtgacgtagcatcgcctttatagtggggactaatttaaaaaggacaatgctgggtcaacgtggaaaaatattttgactacggatatctccgtggcattttagcaatgtatgttcaagccgttcctagcgagcagagtttttctctcgggtttgttgctcaatgctatgcataatttctaccagtttctgtgcgtcgtctcgagtccgttccatcagctcattctgttcgctgatccattgcagtcgttccttccagaaatcccaccgctccttcgagaacgatgagtctcctttccatagattccaatcgggctttttgtttgcttcagcaagggtgaggtccttctttcctacaaacttgaaaataatggaccctgcaatctcaaaaaaaggaaccatagcatgaacatcagtctataggccgaagtcagtatctcaagcacagtgatcatattcttttgcgacccacattcagcataaggatgtaattcgtagccacgcggccatctacaaggtgatagcgctgtaagagcgacggcgagggcggcggaagtggcaccggcccgtgtttccacggctcctgttctaatgcaaagacggggattcgcaatgctatgcttagttcgcgtgaaccagggccatgcggtggatatgcggaaagataatgcgcgcaaaaagcgctgctactgtgaaaagtgtaccacccttcaaaagggtagataccgtatcgcatttcccagtaacctgtaatcagaatattagcccctacattaaatcaacataaacgaccctctggaaggaatcttgggcgaaagccttgtgtccaaaatattggagagaatcaaagaatgggatggccattttgcatgatattttaggggaagaagaagtcacgcacggtcatgagtctcttcccaaatgtccttgaatacggccaagttcctccagtcttccagccgatcctggaagcgtgacgtgcgaacctgttcttcggttctatcaaggtctggaagagctcttattgcctctaccagcttcaaaatagcgggttgatagttcggcatctcaatagcagcatcccaaagtagccatgaaacgcgctcccctttatccacagcttgactctggcgctcttgaatcaggtcatcttcgttacgaagtgacatgaagcgatgagcagcgtcatctactggaactgcattggcagtgccgtaacgctcaacaaattcctgcaatatttgaatctcatcccaggttgggggatctgggtcgccatcctctgggtctggatagaagaagggtttccattcggctttgtactcttccattgttgtgatggaagttgtggtgatttgatctggggtcgccccagtcggttctgacaacgaaggcgtactttcaagtgaaagtgcttaggaacagatcgctttttcggggcagtatggtcatacaagagacaagcaaaggaggcttcgctggtggtcagacctctggaatcctaagttgctccacaatggatgctcttagcacccatatagtgtcttatgtatgtatcagcgaaaaatgctggccaagaagcgctatagccaaagtagttaggggtggattcgaaaagagatttgaagagtatattcgatttcgaaatcattttgcgatgtcattattcgcattcgaaatttctattcgaaaagttatgcggaagtctgccaagaaattggttacgtaaatgattggttaacgccagcaaatccacccgtgatttagcgtcgtcttgtcgcgcacgttgtgtataccaaatcctccttacatatggatctcgtaatttgagactctagcctgtggatcttctcactatggttgatagcagtatttattttccgcctacaatagataacagctcatgtactctcagtgtcattccagctgtaggttggcgcaacacagtaaacacttccagccttcaagctatctgagcattttcccgggtccaaagaagggtttaccatcgtgaagaccgcatgtgtgatactatactgaccacatatacccacacaactatctccactcttggcctcgtaccatttgccacaattccttgttgttcctgtcgccagtgtcgcatttgcaggtggctcgaccttgctatacacatatccattcgattcagagggagcaacgccaccaccagtgctgcttccattgtgcatgccgccctgtggagagagacaaatggctgtaccgtagatcttgcttgctggctgtagattgtcgcagtcgtatgagacccatgggttgtatttgcgtacatcacgatctttcagggagtacgcgtactcgatatctgaacaattgtcgctgggttggatggaatatgtcttctcacaggttaggggaaggcagaatttgagtcccgaagagagggaactgcagtcaaggatctgattttgatttcccatgtacaatgccgctgaagaaatgctcgtgtcttcggcgatcgatgtgcaagtgtcgccgtccacggtggtgtagaaattatccgatccgcagaattcagtttccttttctggggtattgcgagggatttccaggactgtggtcggggcattcaatccgcaacgcttattgattgcttgcaggaccgtctgatagtagtcgtcgtacgcagagtaaggggtacgttgcatcatttgaaggcgttcggtatagcagtaagagcatagctcgttatcaggcattgctgcagtattagggaccaaggtgaaatcatcaatgacatctgtcaacaccggttagatgagttgagtaataattagaggtgtttaacgtaccattgcaatacttccctgagctcttatccttgctgcatgtttcgttataagcagcccaaatgcgaccaccgaacatctccgcaggcgttccactgatgttgtatccggcacagttaagttgcaccgattgataccatgcctggaggttctgaccacaagtcgcatcacaaatcgactcagtcagggtatcgttattcagagaaccgtgatatttggcggacatcattgagttcaagactgggtcgcatttgattcgttccgtcatcgccgactggcaaccgattggaagatcaagaggttccagtgtggaggtgctgtagatactaaacccgtcgaattctctcaggcccgcggtttgatttgcaccaccaagccaagcaagaatagacgagagaagaccattcatgttgtccttggcataagtgggtgttcccttgtaaggtgtgatcatctccacaatagccctagtgcaaagattatacacccaaacatcggtactttgttcaaccccgaaagcccgttgctgacagtcattcgtttcgaggcagtcttgggagtaatccgaaaaccagctgtagataccagtgccaagcacccaaatagaggaggactcgacgatgcgaacaccccaagataccgcacacttggttgaatcactcttgcaatcatcaaaattcgggtcattgacaaacatgcctggtgtgaaggggactggggcttccggcgagggttggtaataaggcgattctgtctgaatcattcccatgagaatattctgcgcccccgaaagctggtactggtagagagtactgtgttccgatgcagtaccataaagccatgccagttgactctcgatcagaataccacgggctgcgtaaacatcaatctgatcttgggaagagacgtcaaggtcatggtcagccacccagacccagatgttctccaggtaggccgtggaagatgaagtcagatgaagcaaaagagatgcagcaatacaatcttcattgacacttcccgtgttctttggacactgtttgttctggaggttcgaccctacagcaccgccaatgcggatgtgagaatcccacatagcagccgatcccttcactgattgctcaacattccactctacaagaatcgcacccgccgtagggccagagactgtgaaaagtagatcttgaatttccactatgccaacgtcaccggaagcaccgaccctaacggcaactcggggatcctccgcatctgcaaaattagtaccagttgccatgatctgagaccatgcctgacccataatgcgtgatccaacaggtacatgcaatgtatcatgaatcatgtaaacaccgtgtggaatgtatacaatagacgaaagattcgcagcataagacaaagcgtaattgagaatcgcagtgtcatccgtagtcccgtcgcccttggctccaaggttcttaacattgacgatttggtcggctgcgagagtctcgtattgaggtcgacgacgagtgaagaggttagagtcaacataggcttgtgtccctagtagctgagtcggtcgcaaaatagcagggatatcctcaccatcagcaaaggatccaactccagatgcatcgctgaccattccgaaaccccatgaagctttgcggacctcatcaccaccagcaagaagaattttattctgaacggaatcaatgattgcggtcttgacgttgaagaatccgacattttgcaacaacagagaagtcgaattttccgcatgaagtgaggttatgattccattcggggtattggcgatgatggcatcagtcaagatgagagatccaacaccttggcccgtactcgaaggtcctccggcctatctagattagcatgacttgccaaatgccattcagctattttgtctatgactcactccacccacaattgtgagtccattcgtgcaagattcaataacgtagtcctgcatggtccacgcccaatcccaatgaacctgaagagcggtgttgcagttcacgaaggtgagctgacttgaagtgaactgttggttaccaaagtaagcactatgcataattaattagaccccattgatattcaaactgcacaagaatgtcattacccaaagttgcctcccacaaacgtaaggtcagctagaaagcctccagatccattctccatgtagattccttgttgcgtgttcgacggaacatctgaattgtataccatgtaaaattctatgttttccagcgacgtcccttgcgcaacttgccagtggatagcacagatgtatgccgaggggtcagttggtctgatgtcgattttgaagtttctaacgctgcgcaagaagttgttttgattaatataccactcttcattgtcactgacatagacatcggaggtaatgacgcccaggccaacgaaactggatgcagccaggatggtaggaacttcgaggggctggtggctgtcagtgattaaacagcacaagcatgcagaacaatcgctcagcagcattgctcgaagaaacttacatcacccaaaaactcagtattatagtactgaatgattggcgagctaaccaggtatgttccggcaggaaaccagactgtcgcagggtagatagtacttgatccacagccgaggccgcagcgtccaccgtccgagatagccttgttgatggcctctgtatcgtctgtgacaccatctccgacggctccatactcgcgaacatctctccatacctattttgcgtcaaacttaaggaaattaatgagaggggaagagggcgggtactttataaccagctggagcaaatgcactttttccattttgttccatcgtagccatccagtacttcgaagtactagctcgcttttggattgctccatgggttgtatcattgccaaacacgatgtcatcggtagtaccggtcgataaaaagtcactcagaccattcgaatgtaccaaggcctggcttggggcattggtatccctgcgaccctttccgtacttattgcgaatctgggaagccacgagactgtgatttccagtcggcttgtttggagttgactcggcgacaattcgagctgcgcgggccagctcagtcgggattgaatatgccttgtttccgctggacggggtagctgttgcgtcacggtggatgagatgaggactttcaactgctttaggactatagcccagaggcgtggcagccaatttggagttcttttttgctccctgtgatttatcaaacgccaaattattaaaattggggttcgatgttcgatctttgttgacttttgcgagagctgccaaagcatctttcactatagtcgcggcatcattgctggtagcgttaccatgactccggtggtgaagacttgtatggcggtggtgaatattatgatctgccgatgcgcaagctgcgaagacaaaggcaattgtcaagctgaagatcagacccaccgatcgcagctgatgaaccgccgatctcctgttgagcttcatcttgccagcaacattcagaaactcgatgctgaagggatatgacttttgggctttctgtgagcgagaatccggtcatatgcgattttagtctaggctcactttcgtcggttctcttattctgggggccgaaaaaaagccagaagcaatttccgcgatgcgaccataaatctactagtttgatcgcggacccttcggagatgcccgtgccaagccggccaagacctgccaaaagcgcacaaagtagggtccgatctccactttcagttcttagttccgccctaaagcatgtcgggaccaaacgatctcatcgtcaacctcacaagggccttggctagttgattcggtgtctcagttgcattcctcgccgctatcgttattttcttggcaaatgcgctattgactaccatttcatcgctaccaaaatatgaaacatgttcctacgaaaatgtcggtcgttagcgagtggtcccaatatttaccttcggctagatccttccgaagtgggaaaacaaggtaggccattggtgagaagtatacgctagatggaagcgaatcggggggccaaaatatcctcatgcaacatcatttcatttagtccggtggcgacccgggggcagcagatcttggctaatataattttgataaaacagaacggagaatcatattgccttaatgagctcccagctagacttgatacccaccaagagataatatcctccagtatctctcctgctatgctgggttcgttcagccagaaatgatcaccatacgcccaactggaggagccctcctttggctccttttgatctccttctgctttatatttaccagtgccaatgcacaagattgcagtgctttgaacacatgcgctactggatgctgcaacaaaggcggatactgcggaatcggtgatgattactgcggttccgactgcgttgcgaattgtgattacgagccagaatgcagtgtctcgaagccctgtgcaagtggatgttgcaacagctatggctattgtggtctgggaccagactgtgagtttctcaatcctctaaaacctagttaccgtgtctttctagagcatatttctgacatgaaatttcagtttgtgccgataaggtttgcgtgggaaactgcgactgcaaggcagagtgcgatcccggcaaatatggtgactatgcggaatcttccaaatgtccattgaatgtctgctgctcgaagttcggcttctgcggcactaccgaagaattttgtggcaagacaaaagtcaagcgcccttcctgtgacaaagatggatctctcaatcgagtcgtagggtactacgagggttggagtccttcacgtcgctgtaatacgttctaccccgaacaaatccccgtgggcatctacacacacttgaattatgctttcgcgtcgatcgatccagatacattcgagatcgtcgcggccaccgagagcgagaaaaagctgatgacgcgcttgacggatcttaagaaggtcgatcccgatctcaaagtcttcattgccgttggtggctggactttcaatgatcctggagccacccaaactctgttctcggatctcgctgcgtcggaaagcaatcagaagaagttcttcaagtccctccagagtttcatgtccatatacgactttgatgggattgatcttgactgggagtatcccgtggcggatgaccgtggcggtcaaaagaaagatttcgacaacttccccaagttcttggccaatttgaagaaatccctcaagtctactggtggccgcgatggagtcagcattacactgcccgcttcttattggtatcttcaacattttgatatcgcaaacctacaaaaacacgtcgacttcttcaacatcatgacctatgatatgcatggaaaatgggacttgggcagtgaatgggtttcccctatgctcgactctcataccaacctaacagagattaccaatgctctcgatttgctctggcgaaacgacatcaagtctgataaggtcgtcctgggtcttgcattctacgctcgagtattcactgctgctgacccgagctgcatggagcctggttgtttgtttgtttccggtggaaacgctgggaaatgcagtcaagaagttggcatcttactgaattctgaaattatggacatcatggataagcagtccctacagtccacgctggataaggaggctgccgtgaagattctcaaatttgacgacaaccagtggcttacctacgaaaattcagacacatttaagctgaaagccgactttgcccgaagccaatgccttggtggtgtgatggtgtgggcggtttcccatgatttaccccaaggtaacttttcccgagcccttggagatgccgtgggccgagaagtgaagtcccttgtcaacagcggtgaattagcatcaatggaggtcaaaaagacccatccgcagtgcaagtggacgaattgcttcgacgattgccctagtggatggtcgcgggttcgccgtacagatgacggtgcccgtgaaggcgagcacatgtgggattctaccgcatgtagttttggacagcatacgttctgctgccctcctgatgccgaacttcccaaatgtggatggtatacccataacaatggcaaatgcaattcggagtgtccttctggctacactgagattggatccaacatacaatactgttctaacgactttaacgactaccaagctgcttgttgtacaactgaaactcccagtatgaaactttactccaagtgtgactgggcgggaaaaccacggaaatgcgacgaggaatgccctagtggcaagtccgaggtggctctgtcaactaccggcagtggtggtgtatactgcgacgttacttctttcaaatacacaatgaacggccaagagggcacaagttgggaggaacgcagctactgctgtagtgaggaagacgatgttgaatggagtaaatgcgaatggcgtgatgacattggcctgatgctcgacaaaagctatgttgacggttactgtctccccggctgtccggatgaatacgtgcgtgtcgctattgatcaacacggtggtggttgcaaaggcgacggtggccgagccaaatgctgcttgccaaaatattcaacagtcagcaagagatcatacaccacgcgggaacagagtcttgatgacttggttaaagggttcatggatgatccgagttgtggagcggacgattacaacttgaagagggatctcgcgggctttgaatattctgtgggaaatacctctttgtccgatctgtctggtactcgaactccaacaacacttcaacgccgctcaacaaccaaacagctagatgctatctatactgttgcatacgcccttgctgtgcagtttacagttaatgcagcctacgaagagatctggaaaaaacgtgtgctgccatcatacccacatcttacagtcaaggctattcgcaattacctgactacgtctgaggactgggctgaaggaggtataagttataaactagagaaggttctttgcgccccaagcatcttcgacagcaagtttgcagaaagaagcattgtctcctgcgcatgcgaaacaagcgattgctgcgatgcaaacgacccggattcctgttcggatcttgacggtgatgatgatgattctactgctcttagcaaaagagttttagataagagagcctcgcgaacgttcgatgtcgatttatcagacggtggagcgcatgctacgatcacttcttggacggtattaatcttcaagtcccaatcaacgtatttttagtgctaatcagacgatcagtatatcgtgcgtggcaacattcgaggaaataatcccatcttggatgaaggttatacctacgatgacgctgaggactgcctcaatactcaaatcgctttgatgtcagtttcgatggcgaatatcggaagatatcagggtacgttcttggtgaccttgtttaccctgaaagtttactcaatttactaattaatcaagtcgaacatgtcgttgagttgaacaccgttgcctttttcctgagagatgcagccaatggggtcctcaggtctggtggtgtgatgagactcggtcgaatttcagtgaccttcgttagacaggctctgatggcgccagttcttaccaacccaccagtaatgactggtgccgaccaatccttgactcccatgacccggattatgcatgctttgggtagcctgaacaaccaagctgatttcaaccttttgcttaatcgtttgaacaacttaaaatccagggtatttgatcatttacaattttttttttctggagatgaccaagttacttatcatttcttttctctagctctggctttcaaaaacactcatcgctgatgaaaaaatggagaaagcaatctcagccgatgacccgaatcgcgcattgatacatctccgcgagcccctcactattatttcctatctcaaccatctcagagtccagcctgacatgatcgacacttttaacacaattcacgtagaattcggtcgagcagatacgtactgggtgaatgctggacatccaaacccgcagtcgcaagccagatgggatgaatgggttcctgacttattagatagtgccactcagaatgttcgcacgtttgttgaaaattggggggatcagatgtataggttttgggcagtccggactggtgataacgttgcgcaaacgctcgagatcattatgactttgcgaagacaggctaaatctgcgaggattaatccgaatggcctggattgaaaatatcaaatgactagttatatacaagatgtagttagaagaaaaatgaactgaatttatttgagcagtgggacatgcaattcaacctctcatctttcacccatttgtagcaccctccatatctaaagcagttggtggcgtatatactgaattgagtagctcaattcaccgaatcaggaatctctcttgcgactgacttagtgctttattggtggctgtacggccttttccatttgacctgccctgatgccggctccggagctttcaccttgacacgccaaaatgagaggctgcggcctgaatactattaaattggcctaatttataagctttgagggcatccaaaaaaaggatctcttcttgttcggagaaaatcgggattgttttggtggtaaaaggggctcttggaaccgactctgcaggttcttcaaacactgcaactagggaagctccgtgacctgcgtatcttatgcagttttggttcgtagttctaagtattcgtcttacgccactacacagaaagaagaaatagaagtcaaacagattaggcagaattcaacgcaatataataacatttaacgaaaattctgtcttttctataacttttgatattcatataaatcttcctctcttcgtatacgcttcggaacccgcccagatatacgcctgtgggcacagcttttctttgaaagaggtatcctgtcttgttcaataagcagggtactaggtatggctgttgctgttggttcgattcttggtctcttgccaaggacactctcgtcggttagctgattccgctcaaatgttgtatcagggtagtcctcttcctcctcctcattatcgctcatcagatcgaacacttccttttcataactatgaccttgccaagtcgatttgcccgcaaacgactctggtgccccctaagcccccaaggtcactagtagatctcagcatctccagtcagggtctaacggtccctttaatggacagaatagattacctaggtaaattcttggataaacaagatccagaaaacactgaaagagttgaaccaacaaatagaagcttccgaagatattagcatgctggttggcttttgtttctcaaccttagaaaagggaagacttcgctacaacattaagaaaactcaaagctaatcaacagaaagccccaaacaattggcgaggtactgcgcactccgcactccgtacactagggcaaactcaaagattgtcttggtaaactcggttggggtttcaaatgttggcttggcagcacgtgtttggagactcggactttccctcctctcttctccactccctcaaatttcacgcgaacatcagttcaacatggacgagctccaaaatagccttggcacttacccagactggggatatgtcatctatcgcactacctactctgctgaatcggaaactctattcccagtcgctatcaggtacattgaagcctgtattaagagatcattcctccgagaccacaaagaagatcctacaaataaacccaacgaaatttgcgccaaataccggtcgactattgtgcaagatcccgcggaattcaatggggcgtctctcgaggcaattcgcgctcattttgaagcgtgggtggaatctcaaggcatgcgtgaccgctggaccaaatggcgaatgtgcatgattattgatgaagaatctctgcaaacactgaaaggtacatcagcagaggcccttgaaaatgagagcccataccattccgatgatgagctacgatgtgtaaaggttcttgaagcattcccggaaacagatcagtatgacacctttccggggtggatgagatgttggacacggtgtctttgggatctctggatgatgatgggagatgctagtgagatgaggcagttatttgacggcattgatgattttccatttgagggggtgtactgcggataattcaaagctgtttcggtctatggcattagagatatgtgattctcaggttgtggaaaatattgttcgacgggcagtcaaataaagaagaaacacatttttcattcattgatcgcgataatatatgattacaacataaggcccactgtgattgcaatccacatgtttaaggtaaacaggagtacgaacagtagctacattcgtcaaagaagatacgggatcggacattgataccgattagttgggaggcttgcaggtttctgtcaaatttaagaactctatccttttttctttgcttggctgttttcacctcgagtaaacgtccaccctccctgtcttcagtagcagtccggccctccaatgtagccctacacaatagtgatgcaccataaacgccatcaagttacacgtcacgcttataagccggtggctccaggaactagccaaagttccccggagcaaagtattgttcctggaggatgtttagctcccagagctggcctatacgttcctgaagtcgatagggcctgtgtataaaactgtctctcaaatcctttgactcgtccttgaaggaagtcgatcccagagacagccccattggcttcaggaatgtacaagctgaccctgggagcttgtggatacacacattgatgaatacaaactcttttgattctccgttcccgggcgctttcccttattattcggtcttatagtccctgtatgtggcaagccgtttcgtgccgccagggaataccttgaaactgctaagccagaggcatgctttcaatgcttcgcaagtgaagggcttccggacaaggttcgctttcagatgtttcataaccccgggtatgttgcgccacttcgatactattcaccttaaagaggaaccactcaaatgcaactggtatgaagtaggcttgctacatcgaatggcttcctagcgctatgcttctgatatacatcacgtgcggagtcgctggccatgctcgaatccgatgcagggacttcaaaaataagaatagatcggctataaatcaacgaagccattgtctcggtatcggaactacctgtgtgaagcagcacaaggatccaaatgttaggtaggagtctgtgataaaagaccgctctttattaattctcgggattggcctgatagcttgggaagtggattctaagtctgtcttcgaaccaacgaagtccctgtacccgactcagcacttaatgttttatatatgctatttcagttttgtgcaatctaatcgggttgcatatatatatacgataaatcacgtaaagtagtgtccaattgtctcttagcagtagcctactcgaactgttggctctcgggtatataatgagccttgtgccctaactctggcttagtcagacttctactttcctcctacctggtcaacctagtacctaggtatacgtctcttcttttcaagccacgataaccagtccgttaatgtgagacccctaggtatggaatgcctaagggaatgctgtatgtaacggaggatcgggaaatagagatagtgatatacgcagtggtatattggaactaatagctgcttctctaaagaagcagcatgcgaggataatatacaggtttgtgggtcatatgacctaaggaggctgtgcaggcagtacgcattactcctgtctagtctatagtcccctacgcacctaggataggtactccacgtactatgataggtattatatttcaggtatcagccttcttagtattggggtcctgataatatccccctccttgtggtatacggtccccgtaggcttagaataggagaagaacaaaggagtagcttagtctattaaaacccatatatctaaaaaacctcgcagtaagggtaaaaaggtatatagggaaaggtatctagcctcaatactccaaaaatatagaaaatgatataatagaagtataaacagagggtatagttgtgagacccctaggtatggaatgcctaagggaatgctgtatgtaatagaggattgggaaatagagatagtgatatacgtagggtatattggaactaatagctgcttctctaaagaagtagtatatgaggataatatataggtttgtgggttatatgacctaaggaggctgtataggtagtacgtattactcctatctagtctacagtcccctatatacctaggataggtactctacgccctataatagtatgagacccctaggtatggaatgcctaagggaatgctgtatgtaatagaggattgggaaatagagatagtgatatacgtagggtatattggaactaatagctgcttctctaaagaagcagtatataaggataatatataggtttatgggttatataacctaaggaggctgtataggtagtatatattactcctatccagcctatagtcccctatatacctaggataggtactctataccctataatagggcttataccttaggtatcagccttcttagtactagggtcctaataatatccccctccttatannnnnnnnnnnnnnnnnnnnnnnnnnnnnnnnnnnnnnnnnnnnnnnnnnnnnnnnnnnnnnnnnnnnnnnnnnnnnnnnnnnnnnnnnnnnnnngttatttactcgcgatttctaggttataaaagtaatctctaactatagtatttacttttagttataacctttactattataattaatcctatagtaaaacctatcttatcgaagttataaatattatctagattaattctatactaaagaatggttttttaaactagattaaactactctctaataatccttaggtctttatatttcgtatacttataattataatatcttaagaatcgggatataagggtagggtactgtttaataaaatatataacctatgttatatgccaagtcgtttaaggaaagagtgcatttgtgtcaaaattctaagtataaggagagaagaagaaaagggaaaactatctacgagggcgttcctccttcttatatccttcctgtttgcttgtttgcttccagtgcaaaagctcgtttgcccttctgagaaggaataagggaagtcgctcctacctagatcgttatataacccccagctaagaatacatttagtccctaaatacaggctttctattattaacgtggttatctaatattctgtcttcttccgctaccttgatctattcctatagttatattagcggtcctggttttgctaggtaggccttatggaattccttgatcttatctggtatattccggaagttacctactagatactattatagatctaggttgtgtcctagctattaaaccctatactataatttctagtagtaagtcctaacgttaaggattttttctacctcctacttattagttttaccgatttatactagtagcggtaggtctagatgctgtcctagtaacagctctgttgttactactttctaaagcttacttagatagaaaatcgggtaaaccttaatagattccggaagtttaaggtaataagaatatcctactttcttaatgatcttataaggactacttgctaaataggagagctttcaactaggctagtcttactgctaatcctttattgttataaatacagaatcgcctatattaaaatccttttcttagcgatatttatttacttattagatctataactgctaagactttttaatctgattttttatctctgtctagatatcctaaaggtaggatagtatatctattacttcttacttattctaggttaaagtctctcggtccttctaatcgaaagatatagtaggtttatagcctctttcgataaagaatagggacttcttagttatatcttaagggagtattaatactataaaatctactattagtaggtattctaactaattgtcctagttctattctacgtagggttataatcgctgtactatatactagttagtaatttcactttatctatttatctaagggtaatatacagtcgataactttctttttatacctaggattcgatagaacttagtctagaattctaagataaattaacctccttaatcagagataattatatttaggattcctataatctaaataatataatctataaataggcgtactatagcttttatatctatttccttctaataaggaattaatactagttgcttacttaaacggtctactactataaatatagtattatacctatagcaatcttttaggaaggatctaaaatctattgtaatatattactatagttgttctagtactagtaggagatatagtagtcttagagtacaatctctctatacctttattcttttataaatcaagtagttatcgatataatacttaatatctgttacctatcctagctaataatatcgttctaatactaatttctttagcttcttaattcctaggtatataattaacggctgttaatatatcttattaagaagccttatacgaagatctcctttattaggaaccttaagttagttcttaaaaagtaatagtctattataaagcgtctactttagattacttccttcgatagctatctatcggaatggtttaaatttagtattttactagttagcttattttacgcggtttataatcttaggatcttctagttcgatcggtaagagctctataggatatatacctttcttaaggtattttttaggaagtatagtaaactatcgactttagtctatatagggtaactccttctaggagagtatattagtaataatattcttctttcctagtcgatacttaataataaagtagaactataagaggaactcgctctactaggcctactgctaatttatctgtcttatagttataaagtattctaaggattaataatctataatgatttcgaaacgctcctttctagagaggccttctagctctagttactactcttataaggtatagataatagctaataactccttatcctatactttatagttaagtttagcggcttatattatttttaagaagaaagctataggatactaaaagttattgttattatagtactgtattaggactactcctaagaccctattcgaggtatctgtttccacttaggtatagagttttagattataatagtgtaggattagagcctcgactaggcttttttttaacttttagaaagtatctttatattatagtgactaatagtagactatatctctttaagttaggtagtagagtggcttagaaatagtactatatccttagataaattgtctgtagaagttatagaatctaaggaaggattagactccctttactattatagatatcttctattactagattatatagatctttttaggatcgatagctattccttctatattaacaataaatcctaagaacttagtcttagttatagagaatttatacttaggtaatataacctatagacctactttctagagttaggagaatacttctcaaatatacctctaatattcctctatagtatcactatagataaggatattatctataaataccatagtatacttatctatatattcctagagtatattatttataaaatactagaaggttattagcctatttattaatctaaagggtataaccttatatttaaaagatctatattatatatagaaagttgtaagatcttctactctaggagttaactagattcagtaaaatccttaatagatatccagctttataaagaacttagctttactagttctttatagtactttattaattagaggtagaggataataatccttctttaaaatactatttagttatcggaaatctatatagaattgtagacctcctttaggcttctttactataaggataggcgaagcgtagggggtagagctaggtataataaatcccttcttaaggttatctataatatactacttagtagcttttaacttattaaataataacttataaagagggtaatatcctggttatatctctgctttaaggataatattgtggtctacccctatataataaggtaggagtttatcggatttttgcttagagaagacttctataaggttatagtattcctataggagagttcttttaatttctttaacctctatatcctagactatcgttaatttaatattaagaatataatcgatttctataagagaagttaagaatactttaactccctttttagtatttatctttatatatagtcgattaaatcctactctgctaataatacttatattaattagtaagagtgtctcccttagttctttttcttaagtctactagactaggatagggggtatcttattattaaggttctatattatcttccgctactccttaacttactagcggctatactaataaatgtaggcttatagatagggcttttaggtttctagatcttattgaggtttattaaagaagtagtcttatctctcaatatttacttagtaatctttgtttattaccttattccttcttagaatctaagtagatattagtatagtaagtttacttactactttatcgaaaagtgttccctattatagctagattattcgataataataacagttaagtagaatgttatattctgtaaactatattcttcctagtattaaattatactatcctaggtctataactaatattagaacttattattagatccttctatcgatatttaatataagtataatagtgtaggtaattaggtatactagttttctattaaatcctctaactaggtacttctaacttagcttatatatatatagactaaatttctttctaagtaatacgataagggtaatattaataaagatagatctgtctgctcttatatctactaatactttaattgaaaaggaacatctattatatattaagtttatattaaaaactaaactatttcctagacttcctaaaagtttctatagattaagggcnnnnnnnnnnnnnnnnnnnnnnnnnnnnnnnnnnnnnnnnnnnnnnnnnnnnnnnnnnnnnnnnnnnnnnnnnnnnnnnnnnnnnnnnnnnnnnnnnnnnnnnnnnnnnnnnnnnnnnnnnnnnnnnnnnnnnnnnnnnnnnnnnnnnnnnnnnnnnnnnnnnnnnnnnnnnnnnnnnnnnnnnnnnnnnnnnnnnnnnnnnnnnnnnnnnnnnnnnnnnnnnnnnnnnnnnnnnnnnnnnnnnnnnnnnnnnnnnnnnnnnnnnnnnnnnnnnnnnnnnnnnnnnnnnnnnnnnnnnnnnnnnnnnnnnnnnnnnnnnnnnnnnnnnnnnnnnnnnnnnnnnnnnnnnnnnnnnnnnnnnnnnnnnnnnnnnnnnnnnnnnnnnnnnnnnnnnnnnnnnnnnnnnnnnnnnnnnnnnnnnnnnnnnnnnnnnnnnnnnnnnnnnnnnnnnnnnnnnnnnnnnnnnnnnnnnnnnnnnnnnnnnnnnnnnnnnnnnnnnnnnnnnnnnnnnnnnnnnnnnnnnnnnnnnnnnnnnnnnnnnnnnnnnnnnnnnnnnnnnnnnnnnnnnnnnnnnnnnnnnnnnnnnnnnnnnnnnnnnnnnnnnnnnnnnnnnnnnnnnnnnnnnnnnnnnnnnnnnnnnnnnnnnnnnnnnnnnnnnnnnnnnnnnnnnnnnnnnnnnnnnnnnnnnnnnnnnnnnnnnnnnnnnnnnnnnnnnnnnnnnnnnnnnnnnnnnnnnnnnnnnnnnnnnnnnnnnnnnnnnnnnnnnnnnnnnnnnnnnnnnnnnnnnnnnnnnnnnnnnnnnnnnnnnnnnnnnnnnnnnnnnnnnnnnnnnnnnnnnnnnnnnnnnnnnnnnnnnnnnnnnnnnnnnnnnnnnnnnnnnnnnnnnnnnnnnnnnnnnnnnnnnnnnnnnnnnnnnnnnnnnnnnnnnnnnnnnnnnnnnnnnnnnnnnnnnnnnnnnnnnnnnnnnnnnnnnnnnnnnnnnnnnnnnnnnnnnnnnnnnnnnnnnnnnnnnnnnnnnnnnnnnnnnnnnnnnnnnnnnnnnnnnnnnnnnnnnnnnnnnnnnnnnnnnnnnnnnnnnnnnnnnnnnnnnnnnnnnnnnnnnnnnnnnnnnnnnnnnnnnnnnnnnnnnnnnnnnnnnnnnnnnnnnnnnnnnnnnnnnnnnnnnnnnnnnnnnnnnnnnnnnnnnnnnnnnnnnnnnnnnnnnnnnnnnnnnnnnnnnnnnnnnnnnnnnnnnnnnnnnnnnnnnnnnnntatcaaaattctaagtataaggagagaagaagaaaagggaaaactatctataagggcgttcctccttcttatatccttcctgtttgcttatttgcttccagtgcaaaagctcgtttgtccttctgagaaggaatgagggaagtcgctcctgcctagatcgtcatatatcctagtatcttcttctcttctttaacctcttatcttacttaatctataagtatatctagttcgtttttttattaaaattctattaatttaatagtacttctattaggataaaactattctagttaggatactactattagttaatagatatatttaaatttagtagtattatattctatatagtatactaagaaattttaatattatatctaccccttccttataggaaatggccttatttttaggtttatatactaactatatttatagaatagtaatagtatattattatcctatactaccctcctctaaggaggataaaactctatatctataggtatagcgctattatatattaggctactagcctataactctactactttacctaataacccctaagcctattaaggaaccactatcttattagtagtactttttctaattataaagctatctaaactataagtataagacccttataggttatactaaatatacttactatactttagtaaagtatagttatatccctataagttaactatattattatagggaggaatctattactaataataatatagcttcctattaaggtttaatctactacctatactactcttaatatattacctatatctacttatatatcctaagtatatattattaagtaaagtattaagcgcttaacctatatagctaataaggctaaaaaggctactactattatagaagctatagaggttatagtagttactaaagttattatagtcctagaaattataaaaaatataggggatatctctaaagttaaagaattctttaatatccttactagtttagtagaggaaagtatagttcctaatataggtatacctagtaatactttatttatccctataaacttaacccctatctcttaggataccctaattatagagtctattttactattctatagtatttttaatactatcctattagtatttaagtctagctaggtatactaaccttacctatacctatatataaatcctattaagtatagggaatatagtactaatttttaatctataattaaagcttcttatattttaaatatatattcttagtccttatcttctttagtatctttataactatatttaacctagctttatagttattaagggccttagtctctttaactatagactacagttcttaggttactttaatattattatagttatactacttaactaagtaggacttattcttcttatcttaataggataggatatattcgatcttatactttacctaattattaatcttaattagtttaggagtattattatta

SEQ ID NO: 169 - DNA, 26179 bp, Penicillium roqueforti
  misc_feature (2691)..(3437): n is a, c, g, or t
  misc_feature (12541)..(13687): n is a, c, g, or t
acgatcaactctaaggatcaactccgaggattaactcagataatcaactccgaggatcaactcagataatcaactccgaggatcaactccaaggatcaactcagaggattaattcagacgattaactcagacgattaactcagacgattaactcagaggaatatcttattagtaaacgaactagcctaagtacctatttaacctgtgacttttgctaatgcttttgcgattcctaccaagtccttttccccgagtgtaattaatgcaaactcggggggaagcgtcttcctgttcctaggaattattagctataccccaaaaccattgatcaaaaatacttactttaaagcccatttttttatattccgcatcctatccttgcaatcgaccggcgttcgcatttccagttgcggatcctccgactcatcatcaagctgcttaatatacgcccaacgcatagggaacttcatccatagccggatcaaccgagcagtttccgcttcttcccatcgtactttcattcgcgagggaccatgcgattgcattcgcgagggaccatgctgttgttctctccctaattctaataactcctggatccgcttttcttcatagacttcgcgctcttccgcaaatgaaggaccatgtcgagatccatatgctacttccctaattacagtccccgcaaagtgactcgggtcacaactttccgatcgtgaggtatcgcgaccagtgccttgttgggtgtcacgaggtcctgagtaccgacctcgtaaagggtgctcctcgatactatggaacacttcctcttcgcctagtatctctgagtctggaagactttgctgtcgatactggctattcccccgtgtaggaggagggcttgaaggaatggcggatgacataccccatatactctcgtcatcacctttattagatggttgctgacgttgaatataactgaagtctcgcgatgttcgcgccctctgtggtgtatgacgagacgaaaagtcgaggtctgaggtgtactctatattccagattgtgtctgcgccttgcccatggcctcggtcgacctggcgcgtttgttgattaggccggcttccggtagtagccgaagctctcagatcacgcctagactgcgtatgtaggcgcgctggtggacccattgactcccgagaagtaccctctgcactagtccatcttaaagatgaagaggtactttgggtttggtccaggacttgagtagtctgagagttatcccttatagcactcatctcacttggagccttcctcttcttcgaagtacttccgcttgacttccatggcaaagactgtgatcggggttggtccagcacagttgtagttggtgagcctcctcctgacattgatgttcgaggaatctggcgacttggggtttcgtctgggacttgtgtagcagaagactgttccctggcagtactccgctcacttagagtcttcgtcttcctggagatactactgcttgattctgacaacagagaccgtcgttcgggaggaagagtactaccctttgacttccatggcaaagaccgtggtcggggttggtccagcacggtcggggtttcgtctaggacttgcgtggcagaagactgttccctagtagtactcatctcactcggagccttcctcttctttgaagtacttccgcttgacttccatggtaaagaccgtgatcggggttggtccagcacagttgtagttggtgagcttcctcctgatattgatgttcgaggaatctggcgacttgtggtttcgtctgggacttgtgtggtagaagactgttccctagtagtactccgctcacttggagtcttcgtcttcctggaggtatcatagattggttcccatggaaggcggcgcccttgatgttgctctggttcctcgtcggttatagggaggtcgccacttgatggctgccgaacgctatgcctccgcggtcgcttttgcatatcgatggtccgagggattttgttaactgatggccatttaataccgcggctctgaggtctctctggttccccagcagtcgaagagatatctagcggttgaacgctctgcctctgaggtagatttggcacattgatagtgcgagtgtaatcgttgattgatggccattgaatgccacgacttcgaggttgctctggtacgctggccgtcatcgtaaggtcccttggggtatccgtctgacttggactacctcccttactgatagtatcaccgatcggccgtggaagaggttgtcttttctgtatttgcgcacccttcgatactagtatttggcttaggggtatcggtcccacttgcagtctcccttgcccgatctcctcgtcagagtcctagaccgccctttctgtaggtgactcggcttcatgatctattattactaccgaatattagtctcgaattaaattccttaagatctcaacgtaccctgaagtactgccttaacccgttgggactgcatatccttgatattccggccagcctatttcaaaggcggtttttgtcacgttaggtccccaattagctaagcaagcaaccccaacttgcgacttcgcaactcagagtatcaactccgagtatcaactcagacgatcaacttagacaatcaactccgagtatcaactcagacgatcaacttagacaatcaactcnnnnnnnnnnnnnnnnnnnnnnnnnnnnnnnnnnnnnnnnnnnnnnnnnnnnnnnnnnnnnnnnnnnnnnnnnnnnnnnnnnnnnnnnnnnnnnnnnnnnnnnnnnnnnnnnnnnnnnnnnnnnnnnnnnnnnnnnnnnnnnnnnnnnnnnnnnnnnnnnnnnnnnnnnnnnnnnnnnnnnnnnnnnnnnnnnnnnnnnnnnnnnnnnnnnnnnnnnnnnnnnnnnnnnnnnnnnnnnnnnnnnnnnnnnnnnnnnnnnnnnnnnnnnnnnnnnnnnnnnnnnnnnnnnnnnnnnnnnnnnnnnnnnnnnnnnnnnnnnnnnnnnnnnnnnnnnnnnnnnnnnnnnnnnnnnnnnnnnnnnnnnnnnnnnnnnnnnnnnnnnnnnnnnnnnnnnnnnnnnnnnnnnnnnnnnnnnnnnnnnnnnnnnnnnnnnnnnnnnnnnnnnnnnnnnnnnnnnnnnnnnnnnnnnnnnnnnnnnnnnnnnnnnnnnnnnnnnnnnnnnnnnnnnnnnnnnnnnnnnnnnnnnnnnnnnnnnnnnnnnnnnnnnnnnnnnnnnnnnnnnnnnnnnnnnnnnnnnnnnnnnnnnnnnnnnnnnnnnnnnnnnnnnnnnnnnnnnnnnnnnnnnnnnnnnnnnnnnnnnnnnnnnnnnnnnnnnnnnnnnnnnnnnnnnnnnnnnnnnnnnnnnnnnnnnnnnnnnnnnnnnnnnnnnnnnnnnnnnnnnnnnnnnnnnnnnnnnnnnnnnnnnnngactatcaactcagactatcaacttagactatcaactcagactatcaactcagaggatcaacttagactatcaactcagagtattaactcagagtattaactcagagtattaactcagagtatcaacttagagtattaactcagacaatcaacttagaggattaactcagacaattaacttagactatcaactcagaggatcaacttagacaatcaactcagaggatcaactcagataatcaactcagacaatcaacttagactatcaactcagaggattaacttagataatcaacttagactagttaactaacgtaattcactaccaagcggcgcacacacccaagtggcgcaccccaaaacacatagtaagaatgataaattccttacctatatctcaactaacaatgttcttatttaatttcattacttcccgatagcaattgataagtatttttagtattatatctctgttttaaataaatcgagaacttgcattgttatggtatcgaaaaatacgtcgctgaacccctagaaatatatatatctcagtttgtcaaagttcctgaaactacataagttagatatatatcatataaaaagaactgggctataaggaaaactttatatagatcactgttgttacgatatcatgttgtaatttatcatttttactatgtgttttggggtgcgccacttgggtgtatgcgccgcttggtagtgaattacgttattaactcagaggatcaactcagacgatcaacttagaggatcaactcagaggattaactcagataattaacttagactatcaacttagacaatcaactcagacaatcaactcagacgatcaactctaaggatcaactccgaggattaactcagataatcaactccgaggatcaactcagataatcaactccgaggatcaactccaaggatcaactcagaggattaattcagacgattaactcagacgattaactcagacgattaactcagaggaatatcttattagtaaacgaactagcctaagtacctatttaacctgtgacttttgctaatgcttttgcgattcctaccaagtccttttccccgagtgtaattaatgcaaactcggggggaagcgtcttcctgttcctaggaattattagctataccccaaaaccattgatcaaaaatacttactttaaagcccatttttttatattccgcatcctatccttgcaatcgaccggcgttcgcatttccagttgcggatcctccgactcatcatcaagctgcttaatatacgcccaacgcatagggaacttcatccatagccggatcaaccgagcagtttccgcttcttcccatcgtactttcattcgcgagggaccatgcgattgcattcgcgagggaccatgctgttgttctctccctaattctaataactcctggatccgcttttcttcatagacttcgcgctcttccgcaaatgaaggaccatgtcgagatccatatgctacttccctaattacagtccccgcaaagtgactcgggtcacaactttccgatcgtgaggtatcgcgaccagtgccttgttgggtgtcacgaggtcctgagtaccgacctcgtaaagggtgctcctcgatactatggaacacttcctcttcgcctagtatctctgagtctggaagactttgctgtcgatactggctattcccccgtgtaggaggagggcttgaaggaatggcggatgacataccccatatactctcgtcatcacctttattagatggttgctgacgttgaatataactgaagtctcgcgatgttcgcgccctctgtggtgtatgacgagacgaaaagtcgaggtctgaggtgtactctatattccagattgtgtctgcgccttgcccatggcctcggtcgacctggcgcgtttgttgattaggccggcttccggtagtagccgaagctctcagatcacgcctagactgcgtatgtaggcgcgctggtggacccattgactcccgagaagtaccctctgcactagtccatcttaaagatgaagaggtactttgggtttggtccaggacttgagtagtctgagagttatcccttatagcactcatctcacttggagccttcctcttcttcgaagtacttccgcttgacttccatggcaaagactgtgatcggggttggtccagcacagttgtagttggtgagcctcctcctgacattgatgttcgaggaatctggcgacttggggtttcgtctgggacttgtgtagcagaagactgttccctggcagtactccgctcacttagagtcttcgtcttcctggagatactactgcttgattctgacaacagagaccgtcgttcgggaggaagagtactaccctttgacttccatggcaaagaccgtggtcggggttggtccagcacggtcggggtttcgtctaggacttgcgtggcagaagactgttccctagtagtactcatctcactcggagccttcctcttctttgaagtacttccgcttgacttccatggtaaagaccgtgatcggggttggtccagcacagttgtagttggtgagcttcctcctgatattgatgttcgaggaatctggcgacttgtggtttcgtctgggacttgtgtggtagaagactgttccctagtagtactccgctcacttggagtcttcgtcttcctggaggtatcatagattggttcccatggaaggcggcgcccttgatgttgctctggttcctcgtcggttatagggaggtcgccacttgatggctgccgaacgctatgcctccgcggtcgcttttgcatatcgatggtccgagggattttgttaactgatggccatttaataccgcggctctgaggtctctctggttccccagcagtcgaagagatatctagcggttgaacgctctgcctctgaggtagatttggcacattgatagtgcgagtgtaatcgttgattgatggccattgaatgccacgacttcgaggttgctctggtacgctggccgtcatcgtaaggtcccttggggtatccgtctgacttggactacctcccttactgatagtatcaccgatcggccgtggaagaggttgtcttttctgtatttgcgcacccttcgatactagtatttggcttaggggtatcggtcccacttgcagtctcccttgcccgatctcctcgtcagagtcctagaccgccctttctgtaggtgactcggcttcatgatctattattactaccgaatattagtctcgaattaaattccttaagatctcaacgtaccctgaagtactgccttaacccgttgggactgcatatccttgatattccggccagcctatttcaaaggcggtttttgtcacgttaggtgtaagatactcctagatttagaaatttcaataaagaaattacttattaaaaatatatattatttattaagggaagcaactttgtggggaatttgggttctagggtttaggaatagttagtataccgtattcagtgattattattcgcttatctttttcatggaaattatatccactctaccataaaatataggggattggtagggttggtgtcagggaagccggaacgggccggaaaggtattccggccgagaacacagcctgcctgataatgtcattgaacgccaagctttagcggttagaaaaataagtgtggatttcaacagctacaagcccgaattcctaccatagaactaccatcacaaatgcctttacgacctagccagcgtacaaggcgtgtacgggaagatacccgagcccgtacagcctttttacgtttaagccagacaaataacctagaatccgaccttgacccattccgcaataccttcctccttaatgatccacgtctaatcgagccttctgaaccatcagactggtcgattatgaacgatcttagggaggcccttgatgctgaaccggagctacgtgagaatctagcagaacccgacatcacttctattctaccactagcacagtataattccccaccgtctttccatccccctcaggcctcagacgatggtttatccgctatctcacctctagtagtcgatgactggcaatctaccccggataatatcattgatccagataccaggccaagttagttctttctagtcactatcgcgatatatccccagggactaaaatataagtagatacaccccagccagagcctacaccaggaccttcccgtgtcccctcgccatcacatgaatctaatactctaggggttgcatctggtcgaccccaattagacccgacaccgctagcccaggcactagtcgaccaactcatccaacatcaaggctgtcaagctcattctctaccttcccgtagcccagagtctgtctctctctcgacggtttcaggctggacctgccctgacgtactctcttccccgagtatcgcccaatatcagtctgggaatccatgggataccttattccctgtcgagctcagacagcaggtctataccggaggtatagatatgagtccgtccctcgatctacatgcagataccgtcgagccagagggtctccaggtctatttcgatattgatagtgccgggggggttgcatcatcacttgccgtcgcgaaagaagggctcaagtggaaggctggccggagcgcagtcagtaatctccagagctcccttcacctcaaccctatcccggtccaatggtttgattctcggcgtcatagtgcgcttcgacccctacatcaagtcccacatctcccgtttggtcgtctcgtgggctttccggaggtagaagtctatctcatttttccacggctctaccacccatcccgcgaccactgggtcatcacagtggatgaatatacgcaatggaccgattctattcttcttcccgcaatccagcagacgtatcctacgtctacggtccagcacctccctagtagcgctgatcatattcggatgaatggtactgctgcacaggtagagggtcgttctggggcccaaactatcactcctacctttacgcaggacttccacttcaatctccacgcagaccgattggatgcactctgggagtgtgttcaaacatatacccagcaagatggacttacccacttttccaactgctctatcctcctaacagctaagaacctgaagcttgtcagccagcgcgctacctgggcccaggcacgtgacgcgtttcttcatcagtggaagcgggctattaacccaacctttctgagagatgatttctacgatatcgccaaggaagtagtaccaagatccccgcaggcgatgactctatgctggcgccgatgctgccttgagagctttagcacgtggctcggccagagtaacgctgccgcagaggattgccaaaattccccgccgacctctcggactgaaggccaggtaaccaacaatgagcaagattaccctaggactcgaagtcggatagtaggccgtccactaagtcctagcgaagatagtctctataacgaaagtgtccatgaggacagcctctatgaggacagccttaatggggacagcctctatgaggaaagcctccatgaagagacccccggttctgattcctacgatccacaccagagtgaacaggatcaaaatcccgctccggagccgtccaaagcccagtggcgccagcaattttatccccagtccctagttcgggatcagtgctcgatgactcttgcaccaaaccgcactagtcctctctggcggcgtggactacgctactgccagttatataatacctcgaaggagatgtttgctgctggtaaccattacctctttggcaatcctcatttcgactcccttactctcgaccctgccatgctacgctcctggcagcatgtcggtggcgcagtcagccactccccaatcacattactccgcggttatattcataccaagattcgcagtcacactgcgcttagggactgctcacagcgctcctatggtacccgtgaggaataccgtgtgactggggctgtattccagaccgtcgatcgactactctgtgcctctggggttgcagatactccaatcattctcccaacggagccattcccattctgggcatatcctacccagttaatgactacctggtggcgctggaatatcaatcgactctgcgttggctttgagatgacatttagccttcgaccgcgtacctttgtgcactgggagcatacccgcgtaatgatgatgtttctcaaatgtcttctctacgtgtatggcggccagggcgggcatcctcagcaaagcctcggtctttggattgaccgtcggagccaaccccgccccggctctgacacagagtttatccaggaaggtatggctcttgggccatcattggcgaagtatggctatggttggcttgcgagtaaggtggactggacggttatggtctttaaacccgcccaccgtgcctatatcgtctttaatacgccaagtatacagtctgtgtatcatcagcgctattgggcagttcggcagtccaaggatgattttttaatcttccatgatgtgctccagcgggttcaagactaccatctcgattctgaccgttctgcgttactccttcagctcctagtggatctctgtctacgtgccttccgccaggatgtctttcgggcccttagtgaacgccagacccagcagcccctcaatgcacactggatcgagaaagctcgggccggcgaggttgcgctcgacatccacgggtttcgccaggttttcgatattggtatcattgaggacgacctccatttcgtcaacaccaaaaattccgctatccgccatctagagaccttattcatccggctctggggctgggacggcgatggtaataatggcgactgggaacgtaagcactgggaatataaaccgtaccgggtcctcttccgccagagctatggtatcatcgcgcagttccatgggatgcaacaggcgcgcgcgtggcgccaacgcctgaaggagacctggattcggtcccactggatcctcccatatcctaactcaagtaccttctggtcccgtggcacgaaacagggtcggctccaggtatggtcaagtgtacatccgggactaggtgagtactacgagcggcgaccccaagggccaccaagccgtatcaccccagagaagctccactatctacctatctcaggctggaaatgtcaacatcctggtcgcatcgcgccgcttgttcagattattcttccacctatcccgtccgatcttgatcattttctcgatctcggtgatagcgtaagcaatacaagcgaggggaatcatctgcataatccgtcacaactaagcattcctcttcctgcaccgggtatacatccagactctgtgcttagtccgttcatccatgctatatctccagagctccactttctccgtcggttcaagaaggaaagcaaacttacgaccgacgagatccaccaagattctaggtggcagcagaggattcttctaaagcatattgaggctatcatccgcgtccatcagcacgagctgaacatgctccagaaacccctagtcgtatggccatcccgcccccgcccgaggctgaccaatggcctctctcagatccatgttacgcctcagcagcttgaggatgaagactcggatactggcaacttctaccaatgtcgtgaacgcctccggcatgagattctacggctacaccaaagggcagggcggacacggcatgagatcgctaggatcgatcgaacggagagaatcatccaggcccaccagccccgagaccttacagatcacgatgaggcttcacagggcccttcggatcaacttaggtgggctaagaagcgaaggcggctcgcccaggaccgactggaacttatttctcgcaagtgtactaggtagtttatgaaaggagaccaggcggtcgatgggactgtatacgcttcatcgcaactgctggatgacaataatagtcgctgcgggggagattatggagaagccatagatgcctgcacgcgttataacttttctccactgtctctcccacagcttccaccgagctcgctggaggattcgcacttcgatatgggggtgtttctaggtgctgaggctgctgcagccgctgtattgccgccgtccagtgactcgttctttgatgaaaccgccggtctgattgaggaggcgtttagggagacgggcggcaagttcttggaggatatattcgatgggagccttgaggatactgggggtatactgcttagagatatttgattagcttgatgttttcctttggctgtatcatcatgaatggctgcacctttttgtcttctaaagatcgcaataccaggattcgatgagtctatgcccgggagaatcgcagttatcgaactggtaaactgtatcaagctttatttattgatagcgtggctgcagttggagtgatgcagcatatagtcgagtgtaagggattcaaggtggattggagatagatagctattctgccgctttgaccgcccaagtagggtagactcagaagaccgcgacaagaggatctactcctttgttctcgcccacgggaaatgttgggtttgatcggcagttggaagttgagttatttcgctcagaatgctgcgacaatagaccccgctttttgtctgtactcacggaaccggaggggtttacccatagcaggagtttaccagcgacaggatacagcatgaatgatggcccccagactctgcaatagtcggtgccttcgaatatcaatatcctgcaatgctagtctataagagagtcagctggataaagtgcacttctccctgtcggcgacctcgagcatcagcatcctacaatatcagtctatagaagagtcagctgtataagttgcgcttcatccccctctgagacattgagtatcaaaccagcggaatgtaatgcaagatcggttaaataaagtacggtttgttttttacctgtggaacctgaggattttgcctgcagctgtgtttggctttctcagatgagcttgctccccaatattggacctnnnnnnnnnnnnnnnnnnnnnnnnnnnnnnnnnnnnnnnnnnnnnnnnnnnnnnnnnnnnnnnnnnnnnnnnnnnnnnnnnnnnnnnnnnnnnnnnnnnnnnnnnnnnnnnnnnnnnnnnnnnnnnnnnnnnnnnnnnnnnnnnnnnnnnnnnnnnnnnnnnnnnnnnnnnnnnnnnnnnnnnnnnnnnnnnnnnnnnnnnnnnnnnnnnnnnnnnnnnnnnnnnnnnnnnnnnnnnnnnnnnnnnnnnnnnnnnnnnnnnnnnnnnnnnnnnnnnnnnnnnnnnnnnnnnnnnnnnnnnnnnnnnnnnnnnnnnnnnnnnnnnnnnnnnnnnnnnnnnnnnnnnnnnnnnnnnnnnnnnnnnnnnnnnnnnnnnnnnnnnnnnnnnnnnnnnnnnnnnnnnnnnnnnnnnnnnnnnnnnnnnnnnnnnnnnnnnnnnnnnnnnnnnnnnnnnnnnnnnnnnnnnnnnnnnnnnnnnnnnnnnnnnnnnnnnnnnnnnnnnnnnnnnnnnnnnnnnnnnnnnnnnnnnnnnnnnnnnnnnnnnnnnnnnnnnnnnnnnnnnnnnnnnnnnnnnnnnnnnnnnnnnnnnnnnnnnnnnnnnnnnnnnnnnnnnnnnnnnnnnnnnnnnnnnnnnnnnnnnnnnnnnnnnnnnnnnnnnnnnnnnnnnnnnnnnnnnnnnnnnnnnnnnnnnnnnnnnnnnnnnnnnnnnnnnnnnnnnnnnnnnnnnnnnnnnnnnnnnnnnnnnnnnnnnnnnnnnnnnnnnnnnnnnnnnnnnnnnnnnnnnnnnnnnnnnnnnnnnnnnnnnnnnnnnnnnnnnnnnnnnnnnnnnnnnnnnnnnnnnnnnnnnnnnnnnnnnnnnnnnnnnnnnnnnnnnnnnnnnnnnnnnnnnnnnnnnnnnnnnnnnnnnnnnnnnnnnnnnnnnnnnnnnnnnnnnnnnnnnnnnnnnnnnnnnnnnnnnnnnnnnnnnnnnnnnnnnnnnnnnnnnnnnnnnnnnnnnnnnnnnnnnnnnnnnnnnnnnnnnnnnnnnnnnnnnnnnnnnnnnnnnnnnnnnnnnnnnnnnnnnnnnnnnnnnnnnnnnnnnnnnnnnnnnnnnnnnnnnnnnnnnnnnnnnnnnnnnnnnnnnnnnnnnnnnnnnnnnnnnnnnnnnntgctggaggtcagagctgggggcgcggtagccactagcattactcgatatgggacagtggacgggcgcagtttcagcctccttgaatgtcttcgccactacttcccctcggcgctcctgaatgcagacctgcgctcctcgagcttgggaaccgacgagatgtgcttacactgcgtcctccgtgtggcattcgatgatccagcgaccctccacgaccagaaaccgttctgcaacccgggctcagggaattcttgccgatcctgctcggaccagggactggcgtgcttccgcatcccgccgctgggaagccgcgagctcgcttcagacatgcttcgccgaacccagatatcgaactcggccttctcccacgaacactggcgcttggtctgccgtacaatcgctgagacagttggggtgagcgagcgggagctccgtcaagcgatgctgtgggataatcgctacctccgcccctgtgagcggtccgcaaggcaccccgaataagcctccatcaatcctgttacgtggtaccaatgatcaaagttgaaagctgcacaagaaatgaatcccatagaagaaataaatcactgctgaaattccttatctgcgatatatatcaaagtaaatcacaccctaagcggaaatgaattcctagtcggctatataaaatcataccagtccccggagtcgaaaaaaagagtttgctccatagtataaggcctctagtctctggacctcttggaatgcagcaagaaatgcctgcgctgctcgctggcgccattgctggataaagacctcggctgcatgggtatcggccccaaagagaacgtccagctcggaaatgacactggtattggtccatcggcggcgtccaaccagcgcatcggagatcgcaccaagtccctggaggtggaccgcgcccgggaatgcatatggcacagctccgcggtggacgctagtaaatccaggggtacctctctcggcggggatgagatcgcgatgcgacgcagcgacagcagaccacgtaccggcatcgtgagtatccagctgctcatggtcttcgccaatgccaataaaccatgggaggacggtacgtcggacttgggtggccgggccggttgagccataggggagctccgggcgcgagatgcgcgcatcccctcggtgacagacctggcgctgccacgtgaggccaaaatcggcctcatcagcggcagtccacatcccactggcgatgcgatgaacgacattctggttggagaggccgcgctgctcgacccgttcccaccactgctgcaagagtccctggcggtgcatgccaaggaggagctcggtacaattcgccgggtcctcgtcgctcagggtgaccgcgccctgtatgatgttagcactccgaccccggctgagatagcgggggatattgatatcgaggtgccgaaatgcggtctgggctccggcactggtacttttcgagtaccacgggaccgagatcaggcgccacgcatgatctgggcgaaggagaacataaaaggcatagtatgcgggatcctggcggatgagctgctggatcagaccgtgccacatacaccggagccatcccatgctggtcacactttcttcggcgggattctcgccctgggcccggtggtgctcatacatgtcgaattccaagtcaatcatcgaccagagaccgccggtatgctcacaggggacatcggcgctatgggtacagccaagcagtttcttctcaccaagccagcggaagagaggaatgaccactgagccatcggcatcccataagtctgcgatgggagccgtcggggggggaccgattacccgggtatagatctcgtctgcagtcatgccactcgcggcaaactggtcgatgcgaggcttaggcatttcgactgggtatttaaagaccccatgtgcagcagtgggactaggggtccgagccgcctgttggaaccacttccactgctcacatgtcgggtcactcttgatatgggcaaggctctccaggtgctcgaagatatattgtaagcggctgaagagtttttgattattcggcttactgcggagcccgattccactggcgaggagtcgagcatgggtccgacagaaattctcgggggaaagtgcccagtattgtgtaccacggccagcaattttctcaaagagttgcggcttgattcgtgtagtattcgcatcgtgggactgatcttgatcagcatttaggatatcgctactaggctgtcgctttccctggagaagacaaaggaggtgaggtgtaaagccgctctcgatgcagaggcatgcactggatgatttctgttttggctgggccctagtagccgaatgctcagaatagtcggggtctaggtggtctgcatcgatatcggtatcactataggcatcagagtctccagtatccatatggtcttcactgtcactgtgagcatcagagtctccagtatccatgtggtcttcactgtcactgtgagcatcagaatgtccagggtcgacgtggtcctcggtaggcctgcaggcatcagagtctccagtgtccacgtggtcttcactgtcaccgtgagcatcagagtctccagtatccacgtggtcttcactgtcaccgtgagcatcagaacatccagtgtccatatgatcttcactgtcaccgcgagcatcagaatgtccagggtcgacgtggtcctcggtagtactacgggcatcagaatccctaagcctatccatcaagtctttagcctcactgtaggtatccgaatctccaggctccgagtcgatctccatatccccctcaggcagtggcgcggtctgcctcggagggatctgagtccgggcctcggtgctgcttcgaatgaccaccgatggtgtactcggcggagacaatgcaagactgagaggaggtgtcgaactcctgggcgtaaatcgtcgctcgccggatttcaccatcgcggcggcgtcagtaaggagcccgtcggatccatagtccattccgatgcggtggagcatggtctgcgtgatatgggtttggcggaaattccgataggcgcgggtgagatcaccctgcgtgagcgaccgcgtcttgagctggccgggccgactagtagagagtcgagtgcagagctcgttattggtggcaagcaggaagctatggaaggtcgggggtttaggccgatggagcatcttactgatcccttctgccatggcgagggtagtgatccgttggaagaggcgctggatcatggcttccgtgatgccatctgccttggatccccagacttgatatgcccgagtctgaatcgagcggatgcgcttcgtcgcattctcatgtcgcctcatcgcccgctgcgcagtctcccagtttttgctctcaacgggtgaggagtcgggatcggagatcacatacttgttatggcatcggctatagaaaagggcaagtaaagcctcgtcggtactgagctgcgtgacgagagcggcgaggacctagggtagaatggtgtgagttggcggtgaatcaatgctgggtgggttcatactagctggcagaggtcatggccggcgcggcctggctgcgtttcaatgatggcgagtgtatcttggaggcgactctgggtccagggaccacctagagtaatggtatgattctgaccggtactgtcagtgatgaagcactcctgatcgagtgacagggctggcataattgaggcgtggagtgatttgattgcgaggctgatgtagaattaaaatatatatattagtgatgcgcggttggaatacatttgagcagggcaacagatatgatctttgatcttgggtttctatttcaggtatcctttgagatcaattatgaaaccagccctggatgcaggcttctaagttgaggaaaaagtttctagtatcctttgacattatacaaacttgaatagcctaggaatagaccttggcgatcactcggtctccggtaatgatttctttcttctaacgaactgggaatccaacttgcagagggactcgggattaggaattccgtagcacttctttattagtactggtttctttgacctatatgggtgattttcctctgtgaatcttcgctccacagtaagcctggaagtcatctcccaagttgataaaaaagtaggctgttctactgtgaaccattactcctacccccttttttttttttacctacaatggctcccacgttaaggtcctctacgataccccaagctgtgaagacagcagcaaaggccccgaagagagcagcaagggccccgaagagagcagcaagggcagcgaagagagcagccacagtagtcaactcgacactcccagacctggacttacctccatatatagtgatacggcaagcccaacccgctgctgcagtcgctgctcgcgatgtaccgttcgcgggggaaaggactttcccaactccgccggtaccctttatctatcacccaaagctgatgtggtgcctccgctgcctaagcgtgaagctgaatgggttcctgccgaacccaggagaaagctttggggcagccggaacactatgctgctttgaatatacgggttcagtcaagtgcgctgggtgtcgggcggccagtcatctctgtgaagtggtatatgccgagcccgaagcggtcggaggttactaacagattcgataggtcccggaggcgatgcagcaggacgcgttggatttgaccgtccttctgcgctggggagatcggttctggactgagccgcagcccagtgttgcatgggatccatcgttactgcaggccgtttcaacgtgtaccttccggctcgcacaatccttctacgcgtttgtcaaggagcatatgcagcgccatgggctggagaagaaagatggcacgaaactgaaaccggtaggtaaccatccgatatccgtgatcagagactaatagagcccaggaggagagggagttatatgaggacttcatccatcgacgccgattgaccctagcatcgatcgcccagaaagcccggtatccagtcgagagacagtgggacctactgtttttacaaccgggggatgaagaatacatgggctggctacgagcgaaggttacattttatattacgatcgaaacgtgtgtgcaacgcctgcacccggctgagaggtccatcgtttatagctggccgctggataagaagcagttaaacttggatttttgaggggatagattgggcttttggagattgaaatacggtatcggcttgagttcttgcgtgtctgctgcgaataactagaaattgagttactgtttctgatctgtatgaattgggtcttgattcggattacaagtatatattggaaagtagagagtatggagtaataagcttggggaatctcgtgggatcgaatgctctttgcctggatagagcatcgcaacccttgtacccaggcccatcggaaccactgcgccaatgcggcccaaagtccccagttcggggtccaccgtgcccaatgctggaagggggctctgataacttctgccgtccctctggcgattaggatgatatcctggataaggatcaggacgtcgcggatgtcctgaaggaggttctgaaccctcgcagcgactgtgacggccttccgcatgatatctgcggcacggtcgaagagggtggtactcgccacagcggacatggcatcaggcattgtaggagataatataggggaatcaagtaggtagatccgacttgaatctgatctctgcgacggtaattagtcaggctgggtgggaacagaattgaggatgacttaccttgagaggatgagtggacttgaatatttcgacgatgcaccttcgggcgatttgggatgattggctttagggctgaccgcctacgggtagttctgccggccataccccacaaatgaattggtctctccgctttactttgagcctcatgtgtatctctttgccctcagcgaatcccccccccctcaatgacactgaccactaatatccgacagaggatattgataccaagttctaaacctaaaatccatactattccatatagagatatccagaccttgactgtacaaccccaaaatctgctcactttgggctggcgaccaatacaaagaattcgctgccacgcaaatgaaatgattcgccggcgatcaaagcccagcgaattctcccaacttctatctatgccccgattgggcgagatacatcaggctggatggtttctttgactgtatactcggctgggattgtacattttccatttccagcgcgcggtcaccagattcgggcttatggaattggggctaagtcgcatgtctttattgcgttttggaatctaactttggatatggtgccctgccactgtgaggaggcttatttctttatttgatactggtgcaatgctaatactttgggtttacaatttcggcctacagccagtaagtagaagctgctcaagccacttcgaaccatccttgaaacccctgctactccgacttaaagcctaatcaattcctctgtgcaatcaattcctctctgcgatcaattcctctctgcgattaatcctctctgcgattaatcctctctgcgatcatggcatcgcaagttggtgggaagcctccagtaatacctgcagtagcgaagccacctgcagccgctcccctgacaggtcctagagtcttggacctgccaacatggaatgtgaggccagagccggtttgggttttctgtcttgggtgtttctatgtcgaggttactggctttcaaccaaacccagcggaatgctttagcttggaagagactatttgcgtattcgaccacccagtcgccagtgactgcgctgggtgtcgggctgcaaagcaggagtgcattatggtatgtgactgagatgaatggttggactgagctaatgatggatataggtcccaagaggattgcaccaagatgcatacgacttcatccagctactagtgtgggtaaaatcgttctgggataccggtgccaccaagaagcatcaatggcagccggagacactacaagtggtatcagaggcttcaggcgagcttgcatccagcttttatatcattgcgaaaaagcacatcgactactggcatcttgggccgagcgctacagccacggacagggatctatatgataaattcgtctatcgccgctcacagatccgtggaacgcgagtggggaagattagaaaagccgaagacactccggttcgcgtcccgctgtgtgagaagactatgattggtcttgtgccaggggatgtagaatttgcactctggactcgggccaaagttgctatcgtggagacggtccgagcagctgtcgctcagctagagggcgatacgggtaagacattgttggcgggctgggactcgatgatacccacatactatatatagggggaggtagaagaacggtggtatttcgaacttgtttaggtagtgttgtgaaattaaatgcttaaagattatgactccggcgcaaaatcaagtcactcctattatatattgtataaactatgtataatcccgactctgtgacataaggcgtcaaaaacttggaatatatgctgacaccagggcttcttcggcggccttgagcattgatatcctagaatatatattgataccgggatcatttgaataaagtgcgcgttatctcccccctccgagacattgagcatgaaaatcgtggaatgcatactgatactaaggcttttcatgcaaactgcgaccaatcacctgcctcagtaccttcgagtatcaagatcgtcgaatgtatgttaataccagggtcacttaaacagactgcgcgtaatcccctggtacaatcgattataactactgcttcaactatagtaagtactgtccaagtttcggaagaaggcggtctgtggcagaatctccgactcaagaacaaaacatgtcgaatcagcccgcgtaacatcggcccagaacccagcaccaaagctgggttccgaacctatgcttttgcaagtagacttcttagggagttaaatgtaaactgtcaagacctcagcgcgatttagctcggtttggccgattggatgggggtagaaatttgcatgcaagtattcagatgcgcacgacttgacagaagcttggcgcgggaaggctccacctccgcgaccacatcaaacttttgagatattcaagtccccacaacatacttcatagcagggctttagactctagtacctatgaaagtttcaagataatcgaggctgggttgcgggctgtacccagcgtagacaattctcagcaagcattcagcggcaaagcctataccgcattagatactccgtggtagagtatcaattgctaatattatggttgccgcataatgcgtcgccgagtcgcgcgactcgcgccccgctgtaaacaataatcttctgaggcctgcctagatcttctttcttttcccccaacactcctccaagcttactctggcgacagctttccaattgtctcaaggtacaccctatgtccttactactttgtcgccaagtctgaccgattctactgcctcagctattcctatccggctcgcctgaccgctgaagttcaagctgtctcaatggcgttccctttggcgttgacgatagtaagagaatttctccaggcggtattctaagcccaaaaatactaactatcctctagtcgcttttcacgctcctcactactgtgtccgtcgcctattacctcttgaaactgcctgctgccatgccctgctccatggcggagatgctcgctttccttacccgggcgaaggaaatcctgcggggagtactcgaggtgctcactattgcgaagaaggtcctggaggaagtgaaagaggtacttcggatcgccaaggagattacgattatcatcggggagctattggccgctgtcagaggcctctttcactggcgccagtgggcgctatggatactggaggttgggcgttcttggctccagtgggcacaggctattaagcattcttggcttcaatggatacaggtcacaaacgattcctggcttcagtgggcacaacaggttcagcgctcctggctccagtggatgcagactattgagtattcatggcttcgatgggagcaacagctcgagtactcctggctccagagggcacaggctattaggtaccaattgattactaactctcttcttgctattctacgttcttctcgagggagaattataattgtggataactagttacttatcctaaagcccaatcgtgcaatacatactgacaccaaggtcagccgaacagagtgcacagaattctccctatcagcgacatcgagcatcagcatcctgcaatgcgcgcaattctccccgtcggcgacctcaagcatcaacatcttgtaatacatactgacaccaaagttagctgaacaaagtgcacgcaattgcccctatcggcgacctcgagcatcagcatcctgcaatacgcgcgattccccctgtccacacaattcaccccgtcggcgacctcgagcatcagcatcctgcaatgcgcgcgattccccctgtccacacaattctccccgtcggtaacctcaagcatcagcatcctgcaatgcgcgcaattcctcccgtcagcgacctcgagtatcagcatcctgcaatgcgcgcaattcctcccgtccacacaattctccccgtcggtaacctcaagcatcagcatcctgcaatgcgcgcaattcctcccgtcagcgacctcgagtatcagcatcctgcaatgcgcgcaattcctcccgtccacacaattctccccgtcggtaacctcaagcatcagcatcctgcaatgcgcgcaattcctcccgtcagcgacctcgagtatcagcatcctgcaatgcgcgcaattcctcccgtccacacaattctccccgtcggtaacctcaagcatcagcatcctgcaatgcgcgcaattcctcccgtcagcgacctcgagtatcagcatcctgcaatgcgcgcaattcctcccgtccacacaattctccccgtcggtaacctcaagcatcagcatcctgcaatgcgcgcaattcctcccgtcagcgacctcgagtatcagcatcctgcaatgcgcgcaattcctcccgtccacacaattctccccgtcggtaacctcaagcatcagcatcctgcaatgcgcgcaattcctcccgtcagcgacctcgagtatcagcatcctgcaatgcgcgcaattcctcccgtccacacaattctccccgtcggtaacctcaagcatcagcatcctgcaatgcgcgcaattcctcccgtcagcgacctcgagtatcagcatcctgcaatgcgcgcaattcctcccgtccacacaattctccccgtcggtaacctcaagcatcagcatcctgcaatgcgcgcaattcctcccgtcagcgacctcgagtatcagcatcctgcaatgcgcgcaattcctcccgtccacacaattctccccgtcggtaacctcaagcatcagcatcctgcaatgcgcgcaattcctcccgtcagcgacctcgagtatcagcatcctgcaatgcgcgcaattcctcccgtccacacaattctccccgtcggtaacctcaagcatcagcatcctgcaatgcgcgcaattcctcccgtcagcgacctcgagtatcagcatcctgcaatgcgcgcaattcctcccgtccacacaattctccccgtcggtaacctcaagcatcagcatcctgcaaaagagagcagcaagggcagcgaagagagcagccacagtagtcaactcgacactcccagacctggacttacctccatatatagtgatacggcaagcccaacccgctgctgcagtcgctgctcgcgatgtaccgttcgcgggggaaaggactttcccaactccgccggtaccctttatctatcacccaaagctgatgtggtgcctccgctgcctaagcgtgaagctgaatgggttcctgccgaacccaggagaaagctttggggcagccggaacactatgctgctttgaatatacgggttcagtcaagtgcgctgggtgtcgggcggccagtcatctctgtgaagtggtatatgccgagcccgaagcggtcggaggttactaacagattcgataggtcccggaggcgatgcagcaggacgcgttggatttgaccgtccttctgcgctggggagatcggttctggactgagccgcagcccagtgttgcatgggatccatcgttactgcaggccgtttcaacgtgtaccttccggctcgcacaatccttctacgcgtttgtcaaggagcatatgcagcgccatgggctggagaagaaagatggcacgaaactgaaaccggtaggtaaccatccgatatccgtgatcagagactaatagagcccaggaggagagggagttatatgaggacttcatccatcgacgccgattgaccctagcatcgatcgcccagaaagcccggtatccagtcgagagacagtgggacctactgtttttacaaccgggggatgaagaatacatgggctggctacgagcgaaggttacattttatattacgatcgaaacgtgtgtgcaacgcctgcacccggctgagaggtccatcgtttatagctggccgctggataagaagcagttaaacttggatttttgaggggatagattgggcttttggagattgaaatacggtatcggcttgagttcttgcgtgtctgctgcgaataactagaaattgagttactgtttctgatctgtatgaattgggtcttgattcggattacaagtatatattggaaagtagagagtatggagtaataagcttggggaatctcgtgggatcgaatgctctttgcctggatagagcatcgcaacccttgtacccaggcccatcggaaccactgcgccaatgcggcccaaagtccccagttcggggtccaccgtgcccaatgctggaagggggctctgataacttctgccgtccctctggcgattaggatgatatcctggataaggatcaggacgtcgcggatgtcctgaaggaggttctgaaccctcgcagcgactgtgacggccttccgcatgatatctgcggcacggtcgaagagggtggtactcgccacagcggacatggcatcaggcattgtaggagataatataggggaatcaagtaggtagatccgacttgaatctgatctctgcgacggtaattagtcaggctgggtgggaacagaattgaggatgacttaccttgagaggatgagtggacttgaatatttcgacgatgcaccttcgggcgatttgggatgattggctttagggctgaccgcctacgggtagttctgccggccataccccacaaatgaattggtctctccgctttactttgagcctcatgtgtatctctttgccctcagcgaatccccccccc

SEQ ID NO: 170 - DNA, 18224 bp, Penicillium roqueforti
  misc_feature (6267)..(10375): n is a, c, g, or t
acagttatagcagtgggttacgataagcatgcattagcagaaggattggcaattattattagtagcatagtcggcaaaattaagagatacctccttacatttcgaagtgcatacaggttatgatttgcctcaacgcttatagcaatagatgcatgaggtggtactaagacagattcggtctcccaaggcccttaacacaccaccaggaacaactttggcgttcccaggagctagactctagagattctccgcaaacattgttatcaaggctttgatactgccgtgtgattgctacgcacctcagaggagccacaggctacactcctagcggaccataggatttagccgaggcaagtatataaaggactcccatattcaactttcacaactctcaccttaccttcacctacacttcatttactctaagctccaatccactgtctaaccatggtctatttcaattcattcttaccgggcttaccgatgagctaatatattatagccgaatatcagagacctgcccaacgagcttttgctgtggattgtgtcgcatttggatggtagtacgatgttcgcccttacaaaattgtgcaaagaccttagttttagactctagcccagtatctagagatataacatcaaattccagaatagcaatctattacacctggccgttaaagacgacaatgttgatcttgcggcggctttgcttcagcataatgctaatatcaatgccttttaccgaggcaaaatacctttgatgagggcgtttcaatactcttccgccgcaatgcgtgagctgttgctcaatcgtcgagagctagatattaatattcagaatcaagcgcacaaaactgcgctatggtataccatttactatagaaattattccatggttaagagccttttagagtaacctaaggtcagagtggatattaaatataaatacagccaaacggcgctctacctagcggttttcgctagtaggatagagtttatacatcttctactatcaagaggtagtaaccctaatctataggatgattcaggcgaatcaccgtaggcctaggcacatcgcttctatagacctataataaaaatgattctttccaacgaccctaactccgacttatttcttagaactcaatcatcacaggacgctcagctaccgctatatcaagcagtagcccatggttctatcgccgctatctagcggcttctaaggcgaaaggacctagcgctagacacctaggaccacaaaggttatacgccgatccatctcgccgttaaaagcaatcgccctaaagtggttagtttactcctaagttacccgcatgtaaatgtgaactgcacagacaaatatggaaatacaccgctttagctttctacttactcgtcctactataaataaccgaaaggctgttagcctagaaaaaaatcgacgttaatctgattaggggccgtgggagattcgaaataccgtccatatctctataccacaccgcgaccagattagatactatacttctacaacgactgcttacagtactagagatcgatccgaatctctgcgttacaggtcactctccaatctccattaccgcatcccgcggatacataagcacggttacttgtctactgagtataggaagcttagagatcaatgggaggggcttcatagatccgccaatctatcaagcggctgcatacggctatcacgatatagtcaggctattagtgcaataaggcacacatctaaatatcaataaaagcacgatcgtatcttacaacactgcactctgcattactgcccgtagtagtgacttggagatggtccaggcactattgcatcataatcaaattgatgtcaaccttcggaatgaatattttgaggatccattgatgttggcagttaaggatggtcatttctcaatagttaatgctcttttagcaaataccagactcaaacgcttcagtttgaagagatcgcttgatctagcaagagacgactgcatccaaagggctattcgaaccagaatagaatccgacagcacttgtcaaacattgttgaggcggtctccgaggatgaaatttggtggtctataaaacccatctacacctctcgtgatacaatgcgagatagctgttttcagcgtcacttgacataaactctcagaattattatctatacctccacgcttcgaataagtttattcacaataaagtcacgttcgacttcaacgacttcttgatgtatagcatccaatgcatcaaagttatacttacaaactatcattaggaggtagtttatacaagtctttatttcaaggcttcatctattacgcattttcacattaaattgagtaactcggggtaaacagcagatgaaatcgagcgtcaacagttgaggtaaccgttgaggtaaccgctcactgactcttttaaaggcagtcgaactcaggccggcacggtcatgggtggcataacagcagcctcggtaggactgccgggctataaaagactcttcagtacaatgtctcttgcatttcattccaaggccacaatagaccatcccacttcgccttacccatatgaccggccagctaagagacagtgccgggtttcccacaacccagaagataagaataagttgcaaagccatccacagcaatcttcaaacggcacaatcattaaacccgaggtcggtcataccctcttcgatagcaaacgaacaagatcactaacactacataggttctagtgcgcacacccggttccctaacggcggagttcatgaagcttctacaccacaacgacgccctggctacaccagccctcaaactgctcgacttgtacttttgcctgtgggaatgctacgtcgtcaagtctgccgaggagatacgacttgaggatgagcagcgacagcttcaatggttaaatgagtggctagcaagcaatagcgacatccttctacaggtctgcgataagcagacattgatactgtaggatcgaaagcgagcagttcaagcactttgtaacggcgtcgtttcagccttgcaagcaagcgatcccaaagccttccatgttaatgggccgtgatgaggtctcggcgttgtcgagcgctcgtgggcgataacgacacctgaatagttctgctatctactgccttctatcccgaatatcatccctctttctagaggcccatacaaccgccggtgatattccgttgggtttggtgacggggtgtaaacatttcacggctgttgatacacccaacgcttagtttagggcatttagtatctggccataattcctcctaatacgtccagaccttatgcaatcaagcatagataaaacctctgctcatcctgcggcattctgtccttcccaacccccgttagatcgccagcttataaacttctgtattctccctatagtacagccttcgacggcgagttttgaaccgaaatgaatgaatcgaacaaaaatggtctgtaccagttgctttcataattatttgtgctaaaattggtagactgtgattttggatcttgaccttcacgccatctggcaagagtgctctggcataccgacaccacctccctgtctcgccaccgactccgaaaattctcggcagattccctcggatgagggtgagcctgcaggagatgagacttcagggtcgtccgtgatcgaatgccttttccatcccacttacgagaagctgtcagccttcaggtagactggtccagaccctctgtccatgtctactcaggctagcgacttgttcctctacatgtcagctttcgctttctctaacgaagtgcactgggtagagactcgactagtcctatttgatcggaaacctggcgagagtataggagagcatctgttcttcctaccccgggttgaaactgccctggggaatctctgtcgggtacgcggacagttgctagacacgatccatgattttggtgcaataggcaatagcttccgactgtctctgcggcctcgcatggaacttctacaatactcgagtcaatcgacactttctccgctaggtacgctaccgaccacactctccctggatccggagttttttgtgcataaaatattgggtggttacaagtgagaccggtccagaacataggggattgttcgcagacacaaggaatataatctgctgttcatactgtagttctccttcaattaaaacgtcattgtagtgtttctgctttaacaataggaaggataactccagatagccgatccctcactctcctcttgcattgtccggcaaccctgccagattgagtctcgaagggtggttccagtcatcgagtaccctaaccagcctctcccgggataattccaatacctgatcgaaaaagcgcagccgagacagctgcttgtcgtggcgaacctgaagaccatctctctcttttctcaggtgcgtaccagtctccttcaaagcaaggttgtcctgctctagcttctggccatcgatgtgcttggacacgcacgactcccataggcggcgatagagtccaacaagtcgagctgctggaaaggcgaacttgggatcgtcgcgctcgaggtctgctagaacctgcaagatcggttgaaatggctcggtcgccagggtgtgtcttgtttttgtttcctgttgcgaaggggagggctgcaatggtcagcaaaagcgtttgaagccgaatcgtttcacttaccaatgagacatggtcggaagtttcctgtgatttgtctttctcaccaaggatgggcaattcactgggcggctgctctcctccaatttcctggtctttttttcgagctgatttgtgcatccatcttgtccgcaggagaaagtcacggctctgaacaataccatttccatcgatccttggtgtctcttatagaatatgcagacgccggtgtgtatgggctgggttttacaatcaccacaacggtcaaccgaagcagtcaaattctgactggagttgttttacttttcagcgggctgttgacagtcaacttgatcataggatagtgatcaacgagtcggtcagggaaatttgatcgcctcacgatattgagggtcagatatgagcgctcatcggggagatatatatttcaatcggacacctctttccactctcgttgaaagtctcagaaagtcgacaaacggaacattatagaacttacagtaacctaaaaaaaaggtccaaaaagaaagcgaaaaaataacttaatgtatcttcatggtcacaagttagaaaattgagtgttgacaacgttgggccaagcttcaacgggttgacgggtcgatcacccgcacatcctactgtgacctcgctttccgcagtctagacggacagacccacagctcaacacaaccaacacaacactaaagcgaggctaggaaaaaaattccatgatttctagggataaaattgaaggcgcttttcggtgaatcaacgctgagtcgctcacagatgagatgatcacaacacaaatatgagcctgtcattgcggattgaatagtgacggaaaaacggtggtaaggcgaatgtatatgtggcagatggtattcctctcaaaattgtgcgttaggtctgatggcccactttcatcgactgttgaggagaaagtaataccgcgaaagtaagattcgtacccatcaccgaatttgcaattaaatcgctcaacgcgcttgcattctatatctccccgttttaaccacagtcaccgtctctttcataaggattgaagtgcttcgacagatgccgaaataatgggctggagatagccacggaaacgctgtgctgtacctgcggttggccggaggacctttcggtctcactagaatcaatactaccatctctaggctcgcgccgctgaatgttatttctttcctttctaatcgcagttaacttgtattgcctttactaaaatgtctactccctgggcgcataggcactggcatactttcaaactcaggataaagattgtctttctttggcataatagccaaaaagggtctagacctttgaaaagctcagacaagaaactgggtctagtttccaggacaaccatgtgaactgatgcaaccaaggcccacgagctaggttctcgagatcgccaccccctcgcaagattgcaacgctactattacactgacgagaccctggagacgaaaagcacccgaccggccaatcaaacaccacgcgtgaattcagacagatgcaggtagggttctgcgatgcagannnnnnnnnnnnnnnnnnnnnnnnnnnnnnnnnnnnnnnnnnnnnnnnnnnnnnnnnnnnnnnnnnnnnnnnnnnnnnnnnnnnnnnnnnnnnnnnnnnnnnnnnnnnnnnnnnnnnnnnnnnnnnnnnnnnnnnnnnnnnnnnnnnnnnnnnnnnnnnnnnnnnnnnnnnnnnnnnnnnnnnnnnnnnnnnnnnnnnnnnnnnnnnnnnnnnnnnnnnnnnnnnnnnnnnnnnnnnnnnnnnnnnnnnnnnnnnnnnnnnnnnnnnnnnnnnnnnnnnnnnnnnnnnnnnnnnnnnnnnnnnnnnnnnnnnnnnnnnnnnnnnnnnnnnnnnnnnnnnnnnnnnnnnnnnnnnnnnnnnnnnnnnnnnnnnnnnnnnnnnnnnnnnnnnnnnnnnnnnnnnnnnnnnnnnnnnnnnnnnnnnnnnnnnnnnnnnnnnnnnnnnnnnnnnnnnnnnnnnnnnnnnnnnnnnnnnnnnnnnnnnnnnnnnnnnnnnnnnnnnnnnnnnnnnnnnnnnnnnnnnnnnnnnnnnnnnnnnnnnnnnnnnnnnnnnnnnnnnnnnnnnnnnnnnnnnnnnnnnnnnnnnnnnnnnnnnnnnnnnnnnnnnnnnnnnnnnnnnnnnnnnnnnnnnnnnnnnnnnnnnnnnnnnnnnnnnnnnnnnnnnnnnnnnnnnnnnnnnnnnnnnnnnnnnnnnnnnnnnnnnnnnnnnnnnnnnnnnnnnnnnnnnnnnnnnnnnnnnnnnnnnnnnnnnnnnnnnnnnnnnnnnnnnnnnnnnnnnnnnnnnnnnnnnnnnnnnnnnnnnnnnnnnnnnnnnnnnnnnnnnnnnnnnnnnnnnnnnnnnnnnnnnnnnnnnnnnnnnnnnnnnnnnnnnnnnnnnnnnnnnnnnnnnnnnnnnnnnnnnnnnnnnnnnnnnnnnnnnnnnnnnnnnnnnnnnnnnnnnnnnnnnnnnnnnnnnnnnnnnnnnnnnnnnnnnnnnnnnnnnnnnnnnnnnnnnnnnnnnnnnnnnnnnnnnnnnnnnnnnnnnnnnnnnnnnnnnnnnnnnnnnnnnnnnnnnnnnnnnnnnnnnnnnnnnnnnnnnnnnnnnnnnnnnnnnnnnnnnnnnnnnnnnnnnnnnnnnnnnnnnnnnnnnnnnnnnnnnnnnnnnnnnnnnnnnnnnnnnnnnnnnnnnnnnnnnnnnnnnnnnnnnnnnnnnnnnnnnnnnnnnnnnnnnnnnnnnnnnnnnnnnnnnnnnnnnnnnnnnnnnnnnnnnnnnnnnnnnnnnnnnnnnnnnnnnnnnnnnnnnnnnnnnnnnnnnnnnnnnnnnnnnnnnnnnnnnnnnnnnnnnnnnnnnnnnnnnnnnnnnnnnnnnnnnnnnnnnnnnnnnnnnnnnnnnnnnnnnnnnnnnnnnnnnnnnnnnnnnnnnnnnnnnnnnnnnnnnnnnnnnnnnnnnnnnnnnnnnnnnnnnnnnnnnnnnnnnnnnnnnnnnnnnnnnnnnnnnnnnnnnnnnnnnnnnnnnnnnnnnnnnnnnnnnnnnnnnnnnnnnnnnnnnnnnnnnnnnnnnnnnnnnnnnnnnnnnnnnnnnnnnnnnnnnnnnnnnnnnnnnnnnnnnnnnnnnnnnnnnnnnnnnnnnnnnnnnnnnnnnnnnnnnnnnnnnnnnnnnnnnnnnnnnnnnnnnnnnnnnnnnnnnnnnnnnnnnnnnnnnnnnnnnnnnnnnnnnnnnnnnnnnnnnnnnnnnnnnnnnnnnnnnnnnnnnnnnnnnnnnnnnnnnnnnnnnnnnnnnnnnnnnnnnnnnnnnnnnnnnnnnnnnnnnnnnnnnnnnnnnnnnnnnnnnnnnnnnnnnnnnnnnnnnnnnnnnnnnnnnnnnnnnnnnnnnnnnnnnnnnnnnnnnnnnnnnnnnnnnnnnnnnnnnnnnnnnnnnnnnnnnnnnnnnnnnnnnnnnnnnnnnnnnnnnnnnnnnnnnnnnnnnnnnnnnnnnnnnnnnnnnnnnnnnnnnnnnnnnnnnnnnnnnnnnnnnnnnnnnnnnnnnnnnnnnnnnnnnnnnnnnnnnnnnnnnnnnnnnnnnnnnnnnnnnnnnnnnnnnnnnnnnnnnnnnnnnnnnnnnnnnnnnnnnnnnnnnnnnnnnnnnnnnnnnnnnnnnnnnnnnnnnnnnnnnnnnnnnnnnnnnnnnnnnnnnnnnnnnnnnnnnnnnnnnnnnnnnnnnnnnnnnnnnnnnnnnnnnnnnnnnnnnnnnnnnnnnnnnnnnnnnnnnnnnnnnnnnnnnnnnnnnnnnnnnnnnnnnnnnnnnnnnnnnnnnnnnnnnnnnnnnnnnnnnnnnnnnnnnnnnnnnnnnnnnnnnnnnnnnnnnnnnnnnnnnnnnnnnnnnnnnnnnnnnnnnnnnnnnnnnnnnnnnnnnnnnnnnnnnnnnnnnnnnnnnnnnnnnnnnnnnnnnnnnnnnnnnnnnnnnnnnnnnnnnnnnnnnnnnnnnnnnnnnnnnnnnnnnnnnnnnnnnnnnnnnnnnnnnnnnnnnnnnnnnnnnnnnnnnnnnnnnnnnnnnnnnnnnnnnnnnnnnnnnnnnnnnnnnnnnnnnnnnnnnnnnnnnnnnnnnnnnnnnnnnnnnnnnnnnnnnnnnnnnnnnnnnnnnnnnnnnnnnnnnnnnnnnnnnnnnnnnnnnnnnnnnnnnnnnnnnnnnnnnnnnnnnnnnnnnnnnnnnnnnnnnnnnnnnnnnnnnnnnnnnnnnnnnnnnnnnnnnnnnnnnnnnnnnnnnnnnnnnnnnnnnnnnnnnnnnnnnnnnnnnnnnnnnnnnnnnnnnnnnnnnnnnnnnnnnnnnnnnnnnnnnnnnnnnnnnnnnnnnnnnnnnnnnnnnnnnnnnnnnnnnnnnnnnnnnnnnnnnnnnnnnnnnnnnnnnnnnnnnnnnnnnnnnnnnnnnnnnnnnnnnnnnnnnnnnnnnnnnnnnnnnnnnnnnnnnnnnnnnnnnnnnnnnnnnnnnnnnnnnnnnnnnnnnnnnnnnnnnnnnnnnnnnnnnnnnnnnnnnnnnnnnnnnnnnnnnnnnnnnnnnnnnnnnnnnnnnnnnnnnnnnnnnnnnnnnnnnnnnnnnnnnnnnnnnnnnnnnnnnnnnnnnnnnnnnnnnnnnnnnnnnnnnnnnnnnnnnnnnnnnnnnnnnnnnnnnnnnnnnnnnnnnnnnnnnnnnnnnnnnnnnnnnnnnnnnnnnnnnnnnnnnnnnnnnnnnnnnnnnnnnnnnnnnnnnnnnnnnnnnnnnnnnnnnnnnnnnnnnnnnnnnnnnnnnnnnnnnnnnnnnnnnnnnnnnnnnnnnnnnnnnnnnnnnnnnnnnnnnnnnnnnnnnnnnnnnnnnnnnnnnnnnnnnnnnnnnnnnnnnnnnnnnnnnnnnnnnnnnnnnnnnnnnnnnnnnnnnnnnnnnnnnnnnnnnnnnnnnnnnnnnnnnnnnnnnnnnnnnnnnnnnnnnnnnnnnnnnnnnnnnnnnnnnnnnnnnnnnnnnnnnnnnnnnnnnnnnnnnnnnnnnnnnnnnnnnnnnnnnnnnnnnnnnnnnnnnnnnnnnnnnnnnnnnnnnnnnnnnnnnnnnnnnnnnnnnnnnnnnnnnnnnnnnnnnnnnnnnnnnnnnnnnnnnnnnnnnnnnnnnnnnnnnnnnnnnnnnnnnnnnnnnnnnnnnnnnnnnnnnnnnnnnnnnnnnnnnnnnnnnnnnnnnnnnnnnnnnnnnnnnnnnnnnnnnnnnnnnnnnnnnnnnnnnnnnnnnnnnnnnnnnnnnnnnnnnnnnnnnnnnnnnnnnnnnnnnnnnnnnnnnnnnnnnnnnnnnnnnnnnnnnnnnnnnnnnnnnnnnnnnnnnnnnnnnnnnnnnnnnnnnnnnnnnnnnnnnnnnnnnnnnnnnnnnnnnnnnnnnnnnnnnnnnnnnnnnnnnnnnnnnnnnnnnnnnnnnnnnnnnnnnnnnnnnnnnnnnnnnnnnnnnnnnnnnnnnnnnnnnnnnnnnnnnnnnnnnnnnnnnnnnnnnnnnnnnnnnnnnnnnnnnnnnnnnnnnnnnnnnnnnnnnnnnnnnnnnnnnnnnnnnnnnnnnnnnnnnnnnnnnnnnnnnnnnnnnnnnnnnnnnnnnnnnnnnnnnnnnnnnnnnnnnnnnnnnnnnnnnnnnnnnnnnnnnnnnnnnnntgcttctccccccccccggggggggggggggggggggggtgttcgaagccagatatcaagctttgaaatcactccattgggtgcaaaaggtactaaaccggcagctccgaagctatttctagtcgtttccgatttgaaggcttcaattcgtgcttctaggtatgccggaaggaaatcatctttatcgatatgatttcctactccgcatttttgtttcaactagccggctataggacttttttaacaccgcgaaatagctaatatcaaaaggctgtaaaagatgggatgaatgcggaggcatatagattggtataatactattttactcacaaatttcatcaaatttcgaggttaaatgaccaccgtatccgtcgagtattaaaagtcgatacctccccttcggaagtgaagaagtcgaaggaataaagagtttttgaagctatcgaattccaattttatcggaggtccaactgttcggactaagtttaaatcgctaatcatccggaaggccgtaggtctaagattcaataaagactttgcctttcaaaatcatatatagagtaagtacctaaccggaagcattcgtacactcgattaccgttatctacttatgatttctaggttataaaactagtcgccgactgtagtatttactccttgtaataaccttcgcggttactattatcctattgcgaaatcggtcttattaaagttataaatgttattagggtcgatcctaaattaaaggatggttttttgaataagtttaaaatactccctaataattttcgggtctttatatttcgtacgttcgtagttataccgttttgagaattaggaggaaagaagagggtgccgttttataaattttgtaacctaattttcgccgaccgaaataaccggggtggttccacattgttgaagaagaagatccgccatttctcgaatggtagagggccggggggctgctccacgagaatctatagagagtatctatttttgaagagattcctcttcaattctagttatattagatgaattggcgcgagaaatcgtgtggtgttggtagccgcgtagtcggtcttggagggttgaacgtggtatgttaaaacggcgcgccacttcacgaattgaagagatttcttgattcttaaaagcctcggtagctaataagattctaccctcttgctctactaaatttttagagcttcgggagtgaattggtggcatggtgggtggttgaattgactaagtgctaattcatggacgcgttttgggtggtgtggccggctcggtagtgaaatacgttactgttgtgatggtaaaactcagtatactcagtatttagtcacctgcgtctgcatagtctcttatatataagagacaccaaggtctgatggaaacggtactacccaggcctttgactttctcctgtgggcaaaatggatgccccaaaccgctcgacaggccaggaaaatgaaggagataagcagcccagtgaattgccaattcttaatgcccgtcctaagaaaaagatataaatataaggcggtcagaatttactatgggcagaatcccactctggcgcaggcggctatagactgcacgacccctgagctttgtcctcaacaagacaatatgggcttttcactaccgccagagttgacatccattattttggagtacatttcccacgacgacctccatttagccaaatatgcaacaatcagtcgcgactggcaggcgatcatcgagagcaaaacattttcatccctcaaaatcaacacccccaagcggttagcagaattcaatgagctatcatgggaccgaagaaggagctatgttcgaaaaatcgatttgattattcaactggagtcatactatgatgatgacgacgcgttcacgcgctacgaaaatgaaggggagatgcaacgaaacaacaagattttcaccacatcgatccactcacttttcattactctggccaaatggccagcaaaagaagaagccgaatttagtctttcgattgaggcccggtcccccgatgatcttctaggtcaaacccctgaggcaaagagggagcgggaaaagcggatagaagaatcttacccaagcaatgatttccaggataagagattcgaaagatcataccttcaattcaatgaggaggtcgttggtgtcaaatgcccggccgtccccacaatcacttcccttgaaatcatgggagcgataaatagaaggaaaattgaaccagcttcttgttctttcatcgtgtcgaagtttcctcgactataccgcctggtgctttatttgaatgattcttgcaaatgggacccggaactgagaaaacgccatagaaacggtatgctacataacaatgcccggtagggtatgtgctaatcggaaatctagatttcgcggattctattctactatggcctgccagtatacggcagctccaccttgacttctgctatgtggcccctttcgatcaaaactattccccagcggcttcaactgtgaaaggaaaaacagacccgctaagctcgagattacgggagttctcgcaacaattgaaagaaatgggcggggcccaatgtgtgcttggaaaagaagtattctggcccacagatgaacagaatcacaatctccagcttcccttttggccccattttaccgatctgtggttaggatacgagccggtgactccaagtggaaactggatgttcgcaaaggaagaacctcaagaatctgaagatgaggatgattatgactcgagtgacccaggctcagactatagtgagatggatgataccgataaagattggattgccccggaggaccgtatgggcaaaatattccgaactaagcccattcacgagttgttcaatgcgtattatctctcagctgccaatgccgctctttgcatgcccaagctggataatatgtttttggaggtgacgaacggctggaatcgacacaagttttggtacagggtgagggatggagtagcgaatgcgacctggtctagtggtgatgatccgaaagcattcgagccaagcgatgaagtcttacaactctggaaacaggttgcttccgcgcgtactggaggtgatcttggagttgaatttgaccttctctgaggtagaagtttcattcgatcctgcaaagcgtttacaccgacatcaatatctgcaagtcactttaggaacaaagtggctctataacgaggatgaatggtggcaatctgtgcttaatcccttgacttcttcccgatgatcatgctgcaattgacaacccacaaagagcctgcgctgtaacccggtaccattcacaaatcaataagaatatggagtgaacgctatatatactttcaatctggcttgtattgtatataatattattatcttacaagaaagaattcatattcgaatattgccagtatcccaaacttaagctattgcgccagtacaataaggtaaatctaagacgagacaccgatgcagtaagcttcgttcaaccagaaactgttttcaaagaacattattagtattccacccaagtgaaccagaagggttcaacaacttacttttcgcaaacattgttcaaagccggattccaggtatctatgcgaatagttaatgtcgagcttcaacattattccgtaaatggagtctactcacaaagctgatcaactgtgatattgttacgagaagcgaacacttcgcatccatcaccgtgctgagccacatcgtatgcgttgcattcagagggaattcctgcctgggttggtgctggtggcgtcatagttgctcgggtagaggtagtcaccgcagtagagtgggtcgttatagcagtggtgggggctttcacacagtatgcttcatctacccaaaggccggcgcagttttctgtgattctgtgtgagtacaaggtacttatgtagtcggcagggatagaggatgattcgagaatatttacctccgacagccggattccatgcgttgaactgggcaagtgtgatgctatatgctgatgcaatcgccgtgcaagagtcgtttgtctgagccacgtaccactccaggcaatgggcaacaatgccagactgcgtcggggcagggggggccccggtggaagaagttgcggaagtgctagatgaagtggtgctcatgttatagctgacggtagaccagccatgtcccattacacaatactagacatattcgtataagctctgtttcggtttgacggccatgacgttgtttcttaccggggtattcatccaaaggttagtgcaatcagaccctaaaaatatgtaagaagcaaagaagacacaaccttcactgatgcaacataccaacacttggattccattcatacagtgacgtgaaaggaatgtcgtatgaccggcaaattgagtcacagtcatcgcctgtagtcaggtcctcctgatttagtattttatcgctgactcgtgggtcgacgtggactgaccgtctacagtttcataccaatcgagacattcagttgtagaattagccggggcatcagtcggaactgaagcccaaaccatcgtggaggttgaggccactggatagaagaagaatataagtatggtgtttgactcttttcgttgcaaagaaaaagactcacaagtttggttgtagaatgaaccacagtatcgtgtctcatttgtcagcttgcaattataaattgtgtagttctgcccgttcaagatactagggttccatagcaggaagtttgtcacactgacaccaaatatggacgccgcttcccaacatccaagcgcacccatgttgttattgaaagtggcaaaacatccgtccaaagagcccgaggccagtggatatgatgaagttgtcgtagttaggttgtaaacgggccgagtcgccgtgggaagattggcccaagttatggctggatcagctgtgaggcttgcgtacttggttgtggttgtggcatatccggagtaggtggctatatcaccgacagcctgtacacaataggagtagtctacggaacggaaatgagcccatccagaaacacaagaggaaggaaactagggaacacttaccgagaaagaggtttgtgcagttcgcgttgagttcagggttgaggaactcaaagtcatccagactaatcccattctggacagtgatcgaggcgcaattgtctagatcattagcaatgctcatagtgaagcgcaagataacgcaccattattcccaacactataccatttcgcacacttggcattagatccatcgacggcgttggtaggaatggaaacagcagttgcagtggtagaagcttcgaaagatgtactcggcttaacatatcccacattattgcccacacaaatcacatggtcaatcttggtgggccaattagcacagacaggatcgattgttggattccacgaaagaagctgtgtgagcgtaatcttatgagcacgtgaaacactgatgcaggtatcatttcgtcggaccaggtagggctgacaagttgcctgcacacacaggctcgtaaggtttcctggccaatttgtacagccaccaagtagtccattgaccattaaaagctgatcagttgcaaccgagtttgcctctgcaaattcatcacaagtgctgccagttggaacaggcacatatgatcctgtgcatgttaaagttgtagaagtgttgctgaccatagttcttttgatcaaggaaatatttagtcagtgaagccttactctatcaaggaggggtgcatacttggaattactgagaaatacgggcgtaggctcagccaacggcggtactgtgacaccacacgaagatgcagaggagaggtattggctagcaagccggtcaatccaccccaccgcattatcgagctgtgctctcataatgcccagaccgcaattcccgcatggatcgctttcgggctcaccggtggtgccgttcacaggcgaaaggtaacaaaatgcaggagggttggcgctgtatattcataagcaaagatatatcttgcaattggaggcaaccaacgcactcatcttgcatgcaggttacattgtagttaacaaaaaaaggatcaaccagcccgattggcttgatcgagattccttcaatattatagatatcatccttgactccagttccatagacataggaggtaccattgacgggctcgtcggtgtaaacatcatttgcacatgaggtcaagaccttcgatcggaaactggtgattgaatcgaaacacgctatagtgcacagagccgtgatattctctgcgctgagtccgctttgaaagtcggaatctcgaatgatatccgaacaatctacggtgctagctaatgcagcagcacaatcacttgaaaacatagtcaagtcggagatattgaagaatcctgttggtacagacattgtcgcggtgtctgccagcagcatatttgtgtggggagttgctacggtcgtcgctgcttcaagtaaagttgtagaagaaagcgcatctcggcgatggtgagccctttgatgcgcagcaatgtggtcgtggggacttgcgacgacaaatggtatacaaatggggagaagacccaatccaagtacttgacaccaaagtggtgtcatgaagagccgcatagtataccaagtgatgggaatgaaggagagttgggagacatatgctggctcaatatagcaaagaaagagggaaaacgtatctttcgctccatcgaacattctaatttcctcgtttaaccatgctcgcctgtggatcccacggacctacagatttctccgtcactagatacgatattttactccctaagctccattcaccgcgctgtgtagcgtgaacatcaagaatccgctgtttcgcaatcttaagtcagttgatacgacactgcgtttgttggggccgaggagccggatggtgattggtatccgactttggctggtaaactaattggtttcaagatccttgattactggttttagccccattcaattctacaaagtaaagacactacataaatgactccactagtggctccacacttgtgtcgcagttgcaagaaggtccacatgaatctgctgcggtgttctggcttttttaacatgactgcgcgctctttgtttttattttattttaaatcgctagcaatgagatgtacaatgtattgcatgcagggtactcaaccacgggaagcaaacagcatgattatatgtataggatttgtgggcctcggcaacgacggaagaccttgcccatcaggggtagtagaaaatattacctttcaacggacccttcataatgcatttctcggttcatgtccgaagggcggaattcatacaacagatccgtatggaaaaaaagccaaggaggccaagcaaacttggcccccgataaggatgaaaatcaagagaaaacgtaggcttatccttattggcgtgtggctggctttgggggccaaaatactactaactatatccactctcgcaatctattccgcttcacactaatccctcaaagaatccgtggacgttggcccactttttagttcttcgtttacattaatatcacgcaataaaaaatggttcggctgctagcttgctatcgatggattgtatctgccaccgattgtcctgtctcgatcaagaatcaagagacagtggggcaggcaaatctcgggaatggatgctgcggacggagtcgcagtcggggtgaccgttagtctaacgctactgtaattgcgataacttgaatctatttagccccgagagcaaagacaactcgccctctcttctatataggaaatcatagagcctaagtacatataaaa

SEQ ID NO: 171 - DNA, 14607 bp, Penicillium roqueforti
  misc_feature (1549)..(7460): n is a, c, g, or t
taccagcactccatctaccagcactccatctaccagcacttcatctactactactacgaaagatagccatctcactatcgtcactgttgcttctgtcactagcacttctactagtattgtttgggtcacagtgtagatagtggaggttacacacacacacacacacacaatttattaacgcccggccactaagcggaaagggcaactatctctgatctactatacatgtcataatagatatagtactgtgtctcctcaaagcccatacaaaaagccttgcaatatatgtcatctcagatgtccgtattgcagcggatcctcgtgggttagtaattttgttagtagactggcttgaaggcgcttctccaagtgttcaacatcctattttcggcagctgaagcgcgtctaccatctgtaaggcgaggtggttggtgggtcagatcggcgaaagggggtgatttatgttcgttggcatggttaggtggcctcgagtcggcccgtggcgatggcgaatcgtattgaggcccgtaccgcctctaagtttggcgtccacttctgatcatcggaaggcgactttcctcctagaaagaaggatatatttctcggtgagtgttggtacattgtagtagttccgtccagtgcgccgtccatttttgacatcgaaataggaagtgctccacggtctctctcgcttgtccacacgcacactggtccgtgtctgctacgttgattcgatagagatatccattgagtcttgccagccagcacgctcgcttctttccacgataatcggtcatatagctgccgggtgtcaagtattgatttgtattactaagttgggcacgcttgataatacattgtagaggcggcagcatgtctacctacatagaccctctccattgcatccccttcgatcctcatccgcatccttcacggggcacagccagttccgcaagtcaataccagtttgcaccttaagcctacttccatagcggccttgaagtctccatcctcgaagccatcttcaaaatcctattctctcagtagaccgacacgcgcgtccgtcctctcgagccatatagaaagtgtcgtatctgcagtccgcccacccagtcttccgtcgcttccattatatgctgcgccccgcggattgtcaaatccatttcgcgctaccttgcaagatctctttgacaaggccgaccatgtctcgcaggagtttgcccagttgtatcctctctgtacacagagcagccaagcaacacagtgttgtccctcccaccaaccaaactacctcgtcgttctctgtgtggattcaaggatgctgggtcgtgtcgtgtcgttcgtggttttgcttttggctctgtcgtttgtgtatcctcagacccagcgatatcctcctttcaacagagcagcccgagagcaccccaagggtgtcctatcccacgaccctagtgtccactgattgtaggatcggtttcgcagtcgtgtgtcgggtggttttcaaagtgttcccttgtcgcctgtgcgtgggggcagggcccccgacccnnnnnnnnnnnnnnnnnnnnnnnnnnnnnnnnnnnnnnnnnnnnnnnnnnnnnnnnnnnnnnnnnnnnnnnnnnnnnnnnnnnnnnnnnnnnnnnnnnnnnnnnnnnnnnnnnnnnnnnnnnnnnnnnnnnnnnnnnnnnnnnnnnnnnnnnnnnnnnnnnnnnnnnnnnnnnnnnnnnnnnnnnnnnnnnnnnnnnnnnnnnnnnnnnnnnnnnnnnnnnnnnnnnnnnnnnnnnnnnnnnnnnnnnnnnnnnnnnnnnnnnnnnnnnnnnnnnnnnnnnnnnnnnnnnnnnnnnnnnnnnnnnnnnnnnnnnnnnnnnnnnnnnnnnnnnnnnnnnnnnnnnnnnnnnnnnnnnnnnnnnnnnnnnnnnnnnnnnnnnnnnnnnnnnnnnnnnnnnnnnnnnnnnnnnnnnnnnnnnnnnnnnnnnnnnnnnnnnnnnnnnnnnnnnnnnnnnnnnnnnnnnnnnnnnnnnnnnnnnnnnnnnnnnnnnnnnnnnnnnnnnnnnnnnnnnnnnnnnnnnnnnnnnnnnnnnnnnnnnnnnnnnnnnnnnnnnnnnnnnnnnnnnnnnnnnnnnnnnnnnnnnnnnnnnnnnnnnnnnnnnnnnnnnnnnnnnnnnnnnnnnnnnnnnnnnnnnnnnnnnnnnnnnnnnnnnnnnnnnnnnnnnnnnnnnnnnnnnnnnnnnnnnnnnnnnnnnnnnnnnnnnnnnnnnnnnnnnnnnnnnnnnnnnnnnnnnnnnnnnnnnnnnnnnnnnnnnnnnnnnnnnnnnnnnnnnnnnnnnnnnnnnnnnnnnnnnnnnnnnnnnnnnnnnnnnnnnnnnnnnnnnnnnnnnnnnnnnnnnnnnnnnnnnnnnnnnnnnnnnnnnnnnnnnnnnnnnnnnnnnnnnnnnnnnnnnnnnnnnnnnnnnnnnnnnnnnnnnnnnnnnnnnnnnnnnnnnnnnnnnnnnnnnnnnnnnnnnnnnnnnnnnnnnnnnnnnnnnnnnnnnnnnnnnnnnnnnnnnnnnnnnnnnnnnnnnnnnnnnnnnnnnnnnnnnnnnnnnnnnnnnnnnnnnnnnnnnnnnnnnnnnnnnnnnnnnnnnnnnnnnnnnnnnnnnnnnnnnnnnnnnnnnnnnnnnnnnnnnnnnnnnnnnnnnnnnnnnnnnnnnnnnnnnnnnnnnnnnnnnnnnnnnnnnnnnnnnnnnnnnnnnnnnnnnnnnnnnnnnnnnnnnnnnnnnnnnnnnnnnnnnnnnnnnnnnnnnnnnnnnnnnnnnnnnnnnnnnnnnnnnnnnnnnnnnnnnnnnnnnnnnnnnnnnnnnnnnnnnnnnnnnnnnnnnnnnnnnnnnnnnnnnnnnnnnnnnnnnnnnnnnnnnnnnnnnnnnnnnnnnnnnnnnnnnnnnnnnnnnnnnnnnnnnnnnnnnnnnnnnnnnnnnnnnnnnnnnnnnnnnnnnnnnnnnnnnnnnnnnnnnnnnnnnnnnnnnnnnnnnnnnnnnnnnnnnnnnnnnnnnnnnnnnnnnnnnnnnnnnnnnnnnnnnnnnnnnnnnnnnnnnnnnnnnnnnnnnnnnnnnnnnnnnnnnnnnnnnnnnnnnnnnnnnnnnnnnnnnnnnnnnnnnnnnnnnnnnnnnnnnnnnnnnnnnnnnnnnnnnnnnnnnnnnnnnnnnnnnnnnnnnnnnnnnnnnnnnnnnnnnnnnnnnnnnnnnnnnnnnnnnnnnnnnnnnnnnnnnnnnnnnnnnnnnnnnnnnnnnnnnnnnnnnnnnnnnnnnnnnnnnnnnnnnnnnnnnnnnnnnnnnnnnnnnnnnnnnnnnnnnnnnnnnnnnnnnnnnnnnnnnnnnnnnnnnnnnnnnnnnnnnnnnnnnnnnnnnnnnnnnnnnnnnnnnnnnnnnnnnnnnnnnnnnnnnnnnnnnnnnnnnnnnnnnnnnnnnnnnnnnnnnnnnnnnnnnnnnnnnnnnnnnnnnnnnnnnnnnnnnnnnnnnnnnnnnnnnnnnnnnnnnnnnnnnnnnnnnnnnnnnnnnnnnnnnnnnnnnnnnnnnnnnnnnnnnnnnnnnnnnnnnnnnnnnnnnnnnnnnnnnnnnnnnnnnnnnnnnnnnnnnnnnnnnnnnnnnnnnnnnnnnnnnnnnnnnnnnnnnnnnnnnnnnnnnnnnnnnnnnnnnnnnnnnnnnnnnnnnnnnnnnnnnnnnnnnnnnnnnnnnnnnnnnnnnnnnnnnnnnnnnnnnnnnnnnnnnnnnnnnnnnnnnnnnnnnnnnnnnnnnnnnnnnnnnnnnnnnnnnnnnnnnnnnnnnnnnnnnnnnnnnnnnnnnnnnnnnnnnnnnnnnnnnnnnnnnnnnnnnnnnnnnnnnnnnnnnnnnnnnnnnnnnnnnnnnnnnnnnnnnnnnnnnnnnnnnnnnnnnnnnnnnnnnnnnnnnnnnnnnnnnnnnnnnnnnnnnnnnnnnnnnnnnnnnnnnnnnnnnnnnnnnnnnnnnnnnnnnnnnnnnnnnnnnnnnnnnnnnnnnnnnnnnnnnnnnnnnnnnnnnnnnnnnnnnnnnnnnnnnnnnnnnnnnnnnnnnnnnnnnnnnnnnnnnnnnnnnnnnnnnnnnnnnnnnnnnnnnnnnnnnnnnnnnnnnnnnnnnnnnnnnnnnnnnnnnnnnnnnnnnnnnnnnnnnnnnnnnnnnnnnnnnnnnnnnnnnnnnnnnnnnnnnnnnnnnnnnnnnnnnnnnnnnnnnnnnnnnnnnnnnnnnnnnnnnnnnnnnnnnnnnnnnnnnnnnnnnnnnnnnnnnnnnnnnnnnnnnnnnnnnnnnnnnnnnnnnnnnnnnnnnnnnnnnnnnnnnnnnnnnnnnnnnnnnnnnnnnnnnnnnnnnnnnnnnnnnnnnnnnnnnnnnnnnnnnnnnnnnnnnnnnnnnnnnnnnnnnnnnnnnnnnnnnnnnnnnnnnnnnnnnnnnnnnnnnnnnnnnnnnnnnnnnnnnnnnnnnnnnnnnnnnnnnnnnnnnnnnnnnnnnnnnnnnnnnnnnnnnnnnnnnnnnnnnnnnnnnnnnnnnnnnnnnnnnnnnnnnnnnnnnnnnnnnnnnnnnnnnnnnnnnnnnnnnnnnnnnnnnnnnnnnnnnnnnnnnnnnnnnnnnnnnnnnnnnnnnnnnnnnnnnnnnnnnnnnnnnnnnnnnnnnnnnnnnnnnnnnnnnnnnnnnnnnnnnnnnnnnnnnnnnnnnnnnnnnnnnnnnnnnnnnnnnnnnnnnnnnnnnnnnnnnnnnnnnnnnnnnnnnnnnnnnnnnnnnnnnnnnnnnnnnnnnnnnnnnnnnnnnnnnnnnnnnnnnnnnnnnnnnnnnnnnnnnnnnnnnnnnnnnnnnnnnnnnnnnnnnnnnnnnnnnnnnnnnnnnnnnnnnnnnnnnnnnnnnnnnnnnnnnnnnnnnnnnnnnnnnnnnnnnnnnnnnnnnnnnnnnnnnnnnnnnnnnnnnnnnnnnnnnnnnnnnnnnnnnnnnnnnnnnnnnnnnnnnnnnnnnnnnnnnnnnnnnnnnnnnnnnnnnnnnnnnnnnnnnnnnnnnnnnnnnnnnnnnnnnnnnnnnnnnnnnnnnnnnnnnnnnnnnnnnnnnnnnnnnnnnnnnnnnnnnnnnnnnnnnnnnnnnnnnnnnnnnnnnnnnnnnnnnnnnnnnnnnnnnnnnnnnnnnnnnnnnnnnnnnnnnnnnnnnnnnnnnnnnnnnnnnnnnnnnnnnnnnnnnnnnnnnnnnnnnnnnnnnnnnnnnnnnnnnnnnnnnnnnnnnnnnnnnnnnnnnnnnnnnnnnnnnnnnnnnnnnnnnnnnnnnnnnnnnnnnnnnnnnnnnnnnnnnnnnnnnnnnnnnnnnnnnnnnnnnnnnnnnnnnnnnnnnnnnnnnnnnnnnnnnnnnnnnnnnnnnnnnnnnnnnnnnnnnnnnnnnnnnnnnnnnnnnnnnnnnnnnnnnnnnnnnnnnnnnnnnnnnnnnnnnnnnnnnnnnnnnnnnnnnnnnnnnnnnnnnnnnnnnnnnnnnnnnnnnnnnnnnnnnnnnnnnnnnnnnnnnnnnnnnnnnnnnnnnnnnnnnnnnnnnnnnnnnnnnnnnnnnnnnnnnnnnnnnnnnnnnnnnnnnnnnnnnnnnnnnnnnnnnnnnnnnnnnnnnnnnnnnnnnnnnnnnnnnnnnnnnnnnnnnnnnnnnnnnnnnnnnnnnnnnnnnnnnnnnnnnnnnnnnnnnnnnnnnnnnnnnnnnnnnnnnnnnnnnnnnnnnnnnnnnnnnnnnnnnnnnnnnnnnnnnnnnnnnnnnnnnnnnnnnnnnnnnnnnnnnnnnnnnnnnnnnnnnnnnnnnnnnnnnnnnnnnnnnnnnnnnnnnnnnnnnnnnnnnnnnnnnnnnnnnnnnnnnnnnnnnnnnnnnnnnnnnnnnnnnnnnnnnnnnnnnnnnnnnnnnnnnnnnnnnnnnnnnnnnnnnnnnnnnnnnnnnnnnnnnnnnnnnnnnnnnnnnnnnnnnnnnnnnnnnnnnnnnnnnnnnnnnnnnnnnnnnnnnnnnnnnnnnnnnnnnnnnnnnnnnnnnnnnnnnnnnnnnnnnnnnnnnnnnnnnnnnnnnnnnnnnnnnnnnnnnnnnnnnnnnnnnnnnnnnnnnnnnnnnnnnnnnnnnnnnnnnnnnnnnnnnnnnnnnnnnnnnnnnnnnnnnnnnnnnnnnnnnnnnnnnnnnnnnnnnnnnnnnnnnnnnnnnnnnnnnnnnnnnnnnnnnnnnnnnnnnnnnnnnnnnnnnnnnnnnnnnnnnnnnnnnnnnnnnnnnnnnnnnnnnnnnnnnnnnnnnnnnnnnnnnnnnnnnnnnnnnnnnnnnnnnnnnnnnnnnnnnnnnnnnnnnnnnnnnnnnnnnnnnnnnnnnnnnnnnnnnnnnnnnnnnnnnnnnnnnnnnnnnnnnnnnnnnnnnnnnnnnnnnnnnnnnnnnnnnnnnnnnnnnnnnnnnnnnnnnnnnnnnnnnnnnnnnnnnnnnnnnnnnnnnnnnnnnnnnnnnnnnnnnnnnnnnnnnnnnnnnnnnnnnnnnnnnnnnnnnnnnnnnnnnnnnnnnnnnnnnnnnnnnnnnnnnnnnnnnnnnnnnnnnnnnnnnnnnnnnnnnnnnnnnnnnnnnnnnnnnnnnnnnnnnnnnnnnnnnnnnnnnnnnnnnnnnnnnnnnnnnnnnnnnnnnnnnnnnnnnnnnnnnnnnnnnnnnnnnnnnnnnnnnnnnnnnnnnnnnnnnnnnnnnnnnnnnnnnnnnnnnnnnnnnnnnnnnnnnnnnnnnnnnnnnnnnnnnnnnnnnnnnnnnnnnnnnnnnnnnnnnnnnnnnnnnnnnnnnnnnnnnnnnnnnnnnnnnnnnnnnnnnnnnnnnnnnnnnnnnnnnnnnnnnnnnnnnnnnnnnnnnnnnnnnnnnnnnnnnnnnnnnnnnnnnnnnnnnnnnnnnnnnnnnnnnnnnnnnnnnnnnnnnnnnnnnnnnnnnnnnnnnnnnnnnnnnnnnnnnnnnnnnnnnnnnnnnnnnnnnnnnnnnnnnnnnnnnnnnnnnnnnnnnnnnnnnnnnnnnnnnnnnnnnnnnnnnnnnnnnnnnnnnnnnnnnnnnnnnnnnnnnnnnnnnnnnnnnnnnnnnnnnnnnnnnnnnnnnnnnnnnnnnnnnnnnnnnnnnnnnnnnnnnnnnnnnnnnnnnnnnnnnnnnnnnnnnnnnnnnnnnnnnnnnnnnnnnnnnnnnnnnnnnnnnnnnnnnnnnnnnnnnnnnnnnnnnnnnnnnnnnnnnnnnnnnnnnnnnnnnnnnnnnnnnnnnnnnnnnnnnnnnnnnnnnnnnnnnnnnnnnnnnnnnnnnnnnnnnnnnnnnnnnnnnnnnnnnnnnnnnnnnnnnnnnnnnnnnnnnnnnnnnnnnnnnnnnnnnnnnnnnnnnnnnnnnnnnnnnnnnnnnnnnnnnnnnnnnnnnnnnnnnnnnnnnnnnnnnnnnnnnnnnnnnnnnnnnnnnnnnnnnnnnnnnnnnnnnnnnnnnnnnnnnacacacacacacacaattcattaacgcccggcggctgagccgaaagggcaactatcgctaaactactatacatgtcatagtatatacaattctgtgactcattggagcccatacacaagaccttggcgtatttgtcattctcagcatgcagtgtcgcagcggatgctcgtgggttagtaagttggttagtagactggcttgaaggcgcttctccaagtgttcaacatcctatcttcggcagttgaagcgcgtctaccgtctgtcgcagggggttggggttagtaagatggtgattttgtccgttcgtcggcaaggttaagtggcctcaagtcggcccgtagcgatcgcaaatcgtattgaggctcgcactgcatccaaattcggcgtccacttctggtcatcggaaggcaattttccacccaagaagaaggagatattacttcggtgagtgtgggtacattgcaacatttccgtccggtgcgcggtccacttccgacatcgaaagagaaagtggtccaccgtctctcttgcttgtccacatgcacattgatctgtctcggcggcattgattcgaaagagatatccattgagtcttgccatacccgtgcggagttgggctaacacgcttgcttctttccacgatagtcggtcatacaactgtcgcgtgtgttttcctggaagggctttatccactcgtctcgaatgtttcccgatgctctcgggtagcttactgctggggattgcttgggtacgcgcgatctttagagtcgtcgatttcattttcgggacctgtccttgcaaaaaatatatacagtagtattcgaaatcagctataccttttcactcttgcgacttgattcccggaaaataaatccgagggttgtgagttctgattggataggaagcgaaggcgccgcctttcagaccgctttctagattgataggagtatcttacaatacagtattaagacatgactagacgtattttacaggaaagtgctatacgcttgctacctggtatgcccctcaattcatgcacaaggcagattcccccccgtcaccatccggctttctgcgacatttcagtgttcaatatcaggcaaaacgacatggctcctagactccctacttcgaagctccatctgatccgtgatatgatagaaagccagtccttcaccacgtctcagatggccgaagaagctgaatgtaccaggcttacgatcattaatattcgcagaaatctacgccaatttggagccatccatgcccctcaaacccgaatcggccgaaaacgaaccgttacaccgctgatgataaatgctctttgtgaccacctttccgagaagcctggtctctacctcgatgagatggcggtcttcttgtgggatgagtttcaaaccatgattacaacctccagcattagaagagcccttgtagcaacaggttggtcgaaaaaggtagtgcgccagcgcgctaaagagcagaacgcggacttgagagactactacctacacaatttatcggagtttcagtcgtatcacctgatatatgttgatgaatctggatgtgataaacgggtcggattcaggcgcaccggttgggcacctcttggcaaagctcctctgcaagtaacacagttccaccgcgaccagcgatatcaaatactacctgcgtatactcaagatggaatcctcctctcgcgtgtatttcgcggctctacagatgctactgtgttcgagggcttcatatcccagcttctgcagcattgcggaaggtggccagagcccaaatctgtcctcgtgatggataatgcatccttccaccactcagagcggcttctacagatgtgtgaggaggccggggtgaaattagtttacctgccgccttattcgccggacctgaatccgattgaagagttctttgctgagcttaaaggtttcatcaggcgtaattggaattactatgaaagagaccctagtcaaggatttgatgttttcttggaatggtgcatcaatgtggttggcgcaaaagaagaaagtgcccgaggtcattttcgtcatgcaggcttaaaaatcgaaaatattggagcttaaagatcaggcatgttgtgttcgatatgcgtcacaagtggaagacaaagaacgtcccacagtaacaatcaaaatcgcattttcctctgtgctgtcctggagtcccccggtgcccaaattgaacgcacaattggactatggtttcggccgcttggctcataataaacaaacgttcactgtttaccatataatagttgcaacttgggaagttagattgtagataatgcaagaattctcaactactttattgatctatacagctgtttttctgtaaaagcagaccaaaagcagacactaaactagaataggtgaaaccttcagattggtattgatcctagcctaacaattgagaagcaggtagctagattatagagtccagttggtttcttcggctgcaagcatccctagataccatatgcccattagcacagtgaggtgaccatggcctccagctgtccaggggattgacatagagacggctagactgccgtttgtatcgagacgtttgaccccaatcagctcagtgttggtaagcacaaagccgtggcgcgctttgtgttggcccatatagaaattgacctgtgaaagaacctgcttatattgttcttgaaagatggggttttgcgaatggcggtagtcagaacgccatttccacgagaccttcatatcccctggggcccggttcgtgctgtcggcgtaggtgcccccgagagtgacgaaggcagtgtctggtcgaaactggtcgacgtacgctgctgagcctccaccgtcaaaagtgatcggcacaaggcttagttgcttaagccggggtgcgagctcctcgaacccggcgcgcagtgcgcgcctgacacggggttgaagcagctcggcaaatcgaagatgaaaatgaggttcatccctaatggcggcaggaggggacctgaagggatcggatgcgatctgctttgagttcaaaaagccgccatatcgttgaatgatcgttgcataattgaactctggccaatcgacgacctgggtgatgtcttccgccccatagcgggggttcgttgtattccgcgatggggcagagccttgaataggaattgccgggagggaaatagagagatactgtaaaagagattggttgttcatattgcagtagtagagtaccacgtctggtgaatatgacttaggagtaatagcctcaggtggtggatacctaatgatagctgatcgtcgagataggcaagaagaatcaggatagagaaataaaatgatgggcttgggaggaaaggaaaatatagggagaatatccgatccaaaattacacatatatctgataggcaatcaatagcgatgtttttggatatagttgattggtgtgactactacagtaagcgctctcacttgaagtgtatcccttggcataagcagagtgaaagaaaacgacaagtgaaaccccgagcgaaccttggatttagagatgtggtgaatctagtggctcaagaggtcttgaaaaaaaaagcgttcattggaaccctggatcaggatcatagtcgatggggcctcaagcacccgccttctcgtttcagtctcagagggcgcttacatgcagccactgaaaccgacccactctgatatttcctcctaccagcggcaacgtagtggatttgattcgcgaggtctgggtttgggatccacatgacccaaagtcaaacttacataatccggctattagtaaccaagacctgtcccattttcgttgcctgacctgcttcaacctctttggaaacgtaacttttcgacaggacaacaatgcatctaagaagtgcttccttaacggacatggatccctccagaatccatataatcagggagattacgtgctctgatgcatcttcaatattcgaggtagatatggatggacaaaagtatgctttgaagcttttccacgacaacggcgaccctggatataccgaaaaaggtcgtgatttgaaccgatttcgctgcgaactcaatgcatataagaagcttttcgcctctggtgtttgtgcgcgcagtttcgttccaaaattctacggctacatcaatcgaatggatcccgcagcacttcatcctgctttccaacacctctctcaagacaagctcaagccgagagcaatattgccagagtacctcccaaatgcagagagtataaactgcattaactacacggatgcgctctatcctcaggcaattgagggcatgaaggagatacacagggcgggcgtttaccgcaaagacatatacccgagaaatattctccttgttcgtagagaccctgataggctggtctggattgactttgatgttgcaacgactttcaccgactttggacctgaagagcttgcccgctgtgactacgaaattgcgcttgcgaagggatttggagatgcactggtaaggactccgctgctccctatgttggaagcagttagcgtgctgactgacgaatgcagagaggtgaccaggctgagggactcccgcctaatacaaaattctattaaggattctataggcctacgaatattccgacaatgtttgatcgcgttcatatgtacgttcttgtaatagatgagttgggcagagctctgagtatgggctgttttcattcggcttactttattttacttcattcttaaaatgtggggttatgtaccgtacagagaaatgcagacctttagaaacccaaagatgtcaagacctgcggcgagacatgtccatcgtagattagaattctatcacgatcgtctaaggggcgcaccgatactgtaggacattaaccgcaaaattcttgtttcttcaccatccgcacctgctacggtgtgtctcgaaactggtgtacccttgtacacacttcaagagattctcgagccccacctgccaatatacactagtctacgttggaaattcttccgagtacccctgttagaatgattctgttgattcaagcaaggccatatctccagaggtcaagaatggataattgacatgactggaggttctctcgagaccatcctttcttcagcctcacttttcccatgctctcatttgccccattggtattcgaatttcttgaattcaaatggcttgtattcaactgtggaaaggggtagcgcttgtctgaggctggacgacacactcaaatacttttccatagtcgctatacataattcagcagcaaacgctggatatgctttcaagagatcgtaatcaatccccggggtcagccctccttgaagttctcgcaggtttttcacaatcagtttgttcgctagcttcctaatatctcggtagtcggcatttgttgaatagagttccttgattgcctgcgccaagatttgcttttcggagcaattttcaaatgaatctcgaaagttctcttctgctttgatcttcagatcttcgatcatgaagtaatccgcttctccatacatgcggagatggaagtagcatgggtggcaatcagtcaatgattcgtcgatagcgtccatttgctcgctggagcctgtcagggggccctcgccagctactgaagtctttttgttcactgagcattggttcataagactcgctgtaggttgatttgacagtgacattgcagtttcaccaacggcaccctccccagctgaaaggttctccatgtcatcttggtctttttgagagagtcgcaaagcctcttccgaatgccatgtatctgattctggtattttgtcgctatcgcttggtaaaatctgaacttcagtcatattgtcttgaactgtgtagtctcccgtgtaaagaaactctagcatcttctcgactagtgtcgggcttctagtatccaaagtgacagatccccgggattcctgtgagtcagtcacataagcttcggtctgagtgttccacaagattctgcctgaatttacaatacctcgaaagaaccacaacaggcgctttgaaaatacttggatctgggacacagaacaagcttatgagctgggaagactcgaccttggcaaaagatcttgagatcgctgtaatcggggttgaggtggaggctttgtgaagatgagcggaactcaagagtaaaaacttgccattactctagagaatctttatagttcttacctagcaatgatacccaaaacgacatcttggtactgtctctgttgcattttatcttgaatgacggcagtgggcttaggggggtcaggagcaggatcactgtccgttgatgaccttgatgaattgtgtcttctgtttcttctgttaaccatagtttggaaataatagaaaataccaaaaattagtcggttaagcggacgtacggcgagacggcaagtaagctatatgtctctgaaaactgcgcgccagatgcacagctgcccgaccccgccttttggttgaacaacaccagcaagtcgtgttcgtgactcaccgctggactgataggagggatctcttagggattcgacgtatcatatataaggcagttcgctccggtaatattcattgttgttagaaggggtgtgggtcatcccctaaaggcagaaaatgccagtgaggactctattgacatggtcatgtgttagcttccaccaaggatatggtcagcaagtagacaaagtagtggctgacaggctaaatactctgacaagtaggtgcataagtggtctgtagatacagcacagtaagaaaaaaatatgtcacttttcttgagctttggtgccgggtaagagccccagaccgtcactcggacataagagcggcaaggagatgtgatagctctccggattaccgaggagtctccagctcttttgtttaactcatttgcattgggatggaaaattcaagctacttttggattcccaatatggcaacaagggtacagtatttcgtgaaaggcgaatgatggattgggactaatacaggaatattaatattccggatttatccctgatacagactagcttacattttgaagtggggccgaggaatttctcaaagtagaggatagtgcaccggtttcgagacgtactgtatagctcgtacagtat

SEQ ID NO: 172 - DNA, 12359 bp, Penicillium roqueforti; identical to SEQ ID NO: 28
  misc_feature (511)..(6228): n is a, c, g, or t

SEQ ID NO: 173 - DNA, 10213 bp, Penicillium roqueforti; identical to SEQ ID NO: 29
  misc_feature (1520)..(7152): n is a, c, g, or t

SEQ ID NO: 174 - DNA, 9539 bp, Penicillium roqueforti; identical to SEQ ID NO: 30
  misc_feature (2691)..(6780): n is a, c, g, or t

SEQ ID NO: 175 - DNA, 9417 bp, Penicillium roqueforti; identical to SEQ ID NO: 31
  misc_feature (1273)..(7734): n is a, c, g, or t

SEQ ID NO: 176 - DNA, 9012 bp, Penicillium roqueforti; identical to SEQ ID NO: 32
  misc_feature (3461)..(7884): n is a, c, g, or t

SEQ ID NO: 177 - DNA, 8768 bp, Penicillium roqueforti; identical to SEQ ID NO: 33

SEQ ID NO: 178 - DNA, 8559 bp, Penicillium roqueforti; identical to SEQ ID NO: 82

SEQ ID NO: 179 - DNA, 7388 bp, Penicillium roqueforti; identical to SEQ ID NO: 131

SEQ ID NO: 180 - DNA, 4874 bp, Penicillium roqueforti; identical to SEQ ID NO: 36

SEQ ID NO: 181 - DNA, 4856 bp, Penicillium roqueforti; identical to SEQ ID NO: 85

SEQ ID NO: 182 - DNA, 4627 bp, Penicillium roqueforti; identical to SEQ ID NO: 38

SEQ ID NO: 183 - DNA, 4406 bp, Penicillium roqueforti; identical to SEQ ID NO: 87

SEQ ID NO: 184 - DNA, 4065 bp, Penicillium roqueforti; identical to SEQ ID NO: 40

SEQ ID NO: 185 - DNA, 3774 bp, Penicillium roqueforti; identical to SEQ ID NO: 41

SEQ ID NO: 186 - DNA, 3164 bp, Penicillium roqueforti; identical to SEQ ID NO: 42

SEQ ID NO: 187 - DNA, 2933 bp, Penicillium roqueforti; identical to SEQ ID NO: 43

SEQ ID NO: 188 - DNA, 2649 bp, Penicillium roqueforti; identical to SEQ ID NO: 44

SEQ ID NO: 189 - DNA, 2630 bp, Penicillium roqueforti; identical to SEQ ID NO: 45

SEQ ID NO: 190 - DNA, 2551 bp, Penicillium roqueforti; identical to SEQ ID NO: 46

SEQ ID NO: 191 - DNA, 2498 bp, Penicillium roqueforti; identical to SEQ ID NO: 47

SEQ ID NO: 192 - DNA, 2459 bp, Penicillium roqueforti; identical to SEQ ID NO: 48

SEQ ID NO: 193 - DNA, 2418 bp, Penicillium roqueforti; identical to SEQ ID NO: 97

SEQ ID NO: 194 - DNA, 2364 bp, Penicillium roqueforti; identical to SEQ ID NO: 50

SEQ ID NO: 195 - DNA, 2230 bp, Penicillium roqueforti; identical to SEQ ID NO: 51

SEQ ID NO: 196 - DNA, 2179 bp, Penicillium roqueforti; identical to SEQ ID NO: 52

SEQ ID NO: 197 - DNA, 2150 bp, Penicillium roqueforti; identical to SEQ ID NO: 53

SEQ ID NO: 198 - DNA, 2077 bp, Penicillium roqueforti
tacttagtaagaaatttaggttatatatctataaactagattataagtatttagttaaaggatttaatagtaaattattataatctattatatatactattattcttatattaagtatagataattaattagatttagtaatagattcttatattaatagtagatttaggctaatataatataattattagatatatatagtttatagagaataatatcttccttaactactaatactattatataatctaactagataaaaataccctttttaataaaataataggttaattaactatacttatacctataataatccttaaatagtctatataaattaaactagattattagaaagatatagaataatataattatctctttaaaaaataagccttaagtaatctatagtagaatctaaagacttagaagctataccttattataagagagtattaatataggtactaataaattatagaatattataagatagaatagaaccttaataataaaattaaactaatatctctttaaatagagatattaaaggaagaaataaaggaagttttcctattaatagatattagtattattagttaagtaagatttaactatttataaatataaatagttattaataaagatattaaagtcttttaaactttactctataaaattaattaaattattaatattaaatctataattaagaaggatatagaatttaataagattaaaaggaccttcttataggaatactataatcttataaaaatattttctaagaaaaaatctaataaactattactatattacctaagggtagactataatattatccttaaagtaaaagtatagttaagatactacctattttataaattattattaaataaactaaaagttataaaatagtatatctttaataatcttaagaaaggatttattattcctaatttagctttatatactttattaatcttaatagtaaagaaactaggtagtagtctatatttctatatagatttctaaagattaaatataattataaagaaagattattacctattacctcttattaataaagtattttaataaataagtaaaataaaattctttataaagcttaatatctactaaggtttctactatattaagttaatactaactatagaagatcttataatattttacacttaatatagattatttaagtataaagtaactctatttaatcttataaatagtcttataatattctagtaatttataaatatagtacttagagactatataaataattatataattatatttataaataatattataatctatagtaagatacttaaagaatataagaagtatattagagaagtctttaaataactataaaaagtaagattatagattatactatctaagtataaattctttatatagaaaactaagttcttaggatttattataaatactaagggtattatagtagatttagagaagattataattattaagaactaaaagatactattaataattaaaagaatatagtctttcttaggattttataacttctattaataatttattaaggattatagtttccttttaaaactattatattatcttatatagtataatataatatataaatagttactagactataagtaagtatttatataattaaagtataagttaataactatacctatcctataatattataatcttaatttctagacttatatagaaatagataccttaaatagaattattagtacttttcttttataatattataaggttaataatttttagtattctattacctttttcttaaagactatataatttatagaatttaattataaaattagggataaggaattccttataattatttatatactttaaaaatagtaactagaatttaaaaggcttttttatataaaatatttcgagatccttatagattattaatctcttaaatactttataatagtataatagataaattaataataagtatagtaaagtaagttccttttatagttctactttataatta
